(19) United States
(12) Patent Application Publication
(10) Pub. No.: US 2023/0235040 A1
(43) Pub. Date: Jul. 27, 2023

(54) ANTI-IL-36 ANTIBODIES AND METHODS OF USE THEREOF

(71) Applicant: Almirall, S.A., Barcelona (ES)

(72) Inventors: Thomas Huber, Barcelona (ES); Vicente Marco Garcia Gonzalez, Barcelona (ES); Bernat Vidal Juan, Barcelona (ES); Germaine Fuh-Kelly, Pacifica, CA (US); Yao-ming Huang, San Mateo, CA (US)

(21) Appl. No.: 18/002,882

(22) PCT Filed: Jun. 21, 2021
(86) PCT No.: PCT/EP2021/066885

§ 371 Date: Dec. 22, 2022

(30) Foreign Application Priority Data
Jun. 22, 2020 (EP) 20382537.7

(51) Int. Cl. C07K 16/24

(52) U.S. Cl. CPC C07K 16/244; C07K 2317/31; C07K 2317/33; C07K 2317/55; C07K 2317/92; C07K 2317/76

(57) ABSTRACT

The present invention provides binding proteins, such as antibodies and antigen-binding fragments, which specifically bind to human IL-36 cytokines, IL-36α, IL-36β, and/or IL-36γ, and block the IL-36 stimulated signaling pathways. Compositions comprising such binding proteins and methods of making and using such binding proteins are also provided.

### CROSS-REFERENCE TO RELATED APPLICATIONS

[0001] This application is a 371 National Phase Entry of International Patent Application No. PCT/EP2021/066885 filed on Jun. 21, 2021, which claims the benefit of European Patent Application No. 20382537.7 filed on Jun. 22, 2020, the contents of which are incorporated herein by reference in their entirety.

### FIELD OF THE INVENTION

[0002] The present disclosure relates generally to binding proteins, such as antibodies and antigen-binding fragments, which bind to IL-36α, IL-36β, and/or IL-36γ, and methods of using such binding proteins.

### REFERENCE TO SEQUENCE LISTING

[0003] The official copy of the Sequence Listing is submitted concurrently with the specification as an ASCII formatted text file. The Sequence Listing is part of the specification and is incorporated in its entirety by reference herein.

### BACKGROUND OF THE INVENTION

[0004] The interleukin-1 (IL-1) family of cytokine ligands and receptors is associated with inflammation, autoimmunity, immune regulation, cell proliferation, and host defense and contributes to the pathology of inflammatory, autoimmune, immune regulatory, degenerative, and cell proliferative (e.g., cancer) diseases and disorders and its cytokine and receptors serve as pathogenic mediators of such diseases and disorders. See, e.g., Cecilia Garlanda et al., Immunity 39:1003-1018 (2013). The IL-1 family of cytokines includes the pro-inflammatory cytokines, interleukin-36 alpha (IL-36 alpha or IL-36α), interleukin-36 beta (IL-36β or IL-36b), and interleukin-36 gamma (IL-36 gamma or IL-36γ). Each of these IL-36 cytokines serves as a ligand capable of binding to the cognate receptor IL-36R (also referred to as “IL1RL2”) that is expressed on the surface of certain cells, including cells of skin, esophagus, tonsil, lung, gut, brain, and immune cells including T cells. Upon binding of an IL-36 cytokine to IL-36R, an accessory protein co-receptor, IL1RAP, is recruited to form a ternary complex comprising the IL-36 cytokine, IL-36R, and IL1RAP. This ternary complex facilitates intracellular signal transduction and activation of a set of transcription factors, including NF-κB and AP-1, and mitogen-activated protein kinases, which trigger a cascade of inflammatory and immune responses, including the downstream production of numerous cytokines, chemokines, enzymes, and adhesion molecules, including IFN-γ, TNFα, IL-1α, IL-1β, IL-6, IL-8, IL-12, IL-23, CXCL1, CXCL8, and CCL20.

[0005] The IL-36 cytokines, IL-36α, IL-36β, and IL-36γ, are known to be highly expressed in several tissues, including skin and internal epithelial tissues that have been exposed to pathogens. For example, expression of IL-36α, IL-36β and IL-36γ is significantly up-regulated in TNF-α-stimulated human keratinocytes (Carrier, et al. (2011) Journal of Investigative Dermatology), and IL-36γ mRNAs are overexpressed in psoriasis skin lesions (D'Erme, et al. (2015) Journal of Investigative Dermatology). Elevated IL-36α mRNA and protein expression also have been observed in chronic kidney disease (Ichii et al, Lab Invest., 90(3): 459-475 (2010)). Additionally, murine bone marrow-derived dendritic cells (BMDCs) and CD4+ T cells respond to IL-36α, IL-36β, and IL-36γ by producing proinflammatory cytokines (e.g., IL-12, IL-1β, IL-6, TNF-α, and IL-23) thereby inducing a proinflammatory effect more potently than other IL-1 cytokines (Vigne et al, Blood, 118(22): 5813-5823 (2011)).

[0006] Transgenic mice overexpressing IL-36α in keratinocytes exhibit a transient inflammatory skin disorder at birth that renders mice highly susceptible to a 12-0-tetradecanoylphorbol 13-acetate-induced skin pathology resembling human psoriasis (Blumberg et al, J. Exp. Med., 204(11): 2603-2614 (2007); and Blumberg et al, J. Immunol, 755(7):4354-4362 (2010)). Furthermore, IL-36R-deficient mice are protected from imiquimod-induced psoriasiform dermatitis (Tortola et al, J. Clin. Invest., 122(11): 3965-3976 (2012)). These results strongly suggest a role for IL-36 in certain inflammatory disorders of the skin.

[0007] IL-36 cytokines are implicated in certain severe forms of psoriasis, including pustular psoriasis, generalized pustular psoriasis (GPP), and palmo-plantar pustulosis (PPP)) (see, e.g., Town, I E. and Sims, I E., Curr. Opin. Pharmacol, 12(4): 486-90 (2012); and Naik, H. B. and Cowen, E. W., Dermatol Clin., 31(3): 405-425 (2013)). Pustular psoriasis is a rare form of psoriasis characterized by white pustules surrounded by red skin. Generalized pustular psoriasis is a severe, systemic form of pustular psoriasis that has a high risk of fatality, while palmo-plantar pustulosis is a chronic form of pustular psoriasis that affects the palms of the hands and soles of the feet. Current treatments for pustular psoriasis, GPP, and PPP include oral retinoids and topical steroids, but these treatments exhibit poor efficacy and severe side effects.

### SUMMARY OF THE INVENTION

[0008] The present invention provides antibodies that specifically bind to IL-36 cytokines with high affinity. The antibodies are capable of decreasing, inhibiting, and/or fully-blocking signaling stimulated by binding of IL-36α, IL-36β, or IL-36γ to their cognate receptor, IL-36R. The present disclosure also provides uses of the anti-IL-36 antibodies in methods of treating IL-36-mediated diseases, such as inflammatory diseases, autoimmune diseases, and cancers including, but not limited to acute generalized exanthematous pustulosis (AGEP), chronic obstructive pulmonary disease (COPD), childhood pustular dermatosis, eczema, generalized pustular psoriasis (GPP), inflammatory bowel disease (IBD), palmoplantar pustular psoriasis (PPP), psoriasis, TNF-induced psoriasis form skin lesions in Crohn's patients, Sjogren's syndrome, and uveitis. In an especially preferred instance the antibodies are multi-specific antibodies and in particular bispecific antibodies that comprise one antigen binding site for IL-36β, and a second antigen binding site for IL-36α, and/or IL-36γ, preferably for both IL-36α, and IL-36γ.

[0009] In one embodiment the present invention provides an anti-IL-36 antibody comprising: (i) a heavy chain comprising a heavy chain variable region comprising at least one of a heavy chain hypervariable region (HVR-H1) comprising the sequence of SEQ ID NO: 106, a second heavy chain hypervariable region (HVR-H2) comprising the sequence of SEQ ID NO: 107, and a third heavy chain hypervariable region (HVR-H3) comprising the sequence of SEQ ID NO: 108, wherein the heavy chain further comprises Alanine residues at positions 234 and 235 according to the EU system of numbering; and (ii) a heavy chain comprising a heavy chain variable region comprising at least one of a heavy chain hypervariable region (HVR-H1) comprising the sequence of SEQ ID NO: 158, a second heavy chain hypervariable region (HVR-H2) comprising the sequence of SEQ ID NO: 159, and a third heavy chain hypervariable region (HVR-H3) comprising the sequence of SEQ ID NO: 160, wherein the heavy chain further comprises Alanine residues at positions 234 and 235 according to the EU system of numbering.

[0010] In one preferred embodiment, the at least one HVR sequence present is the HVR3 sequence specified above, for instance the HVR3 sequence of SEQ ID NO: 108 may be present in the heavy chain of (i) and/or the HVR3 sequence of SEQ ID NO: 160 for the heavy chain of (ii). In a preferred embodiment at least both of those sequences may be present in the antibody.

[0011] In one preferred embodiment, the anti-IL-36 antibody comprises: (i) a heavy chain comprising a heavy chain variable region comprising a heavy chain hypervariable region (HVR-H1) comprising the sequence of SEQ ID NO: 106, a second heavy chain hypervariable region (HVR-H2) comprising the sequence of SEQ ID NO: 107, and a third heavy chain hypervariable region (HVR-H3) comprising the sequence of SEQ ID NO: 108, wherein the heavy chain further comprises Alanine residues at positions 234 and 235 according to the EU system of numbering; and (ii) a heavy chain comprising a heavy chain variable region comprising a heavy chain hypervariable region (HVR-H1) comprising the sequence of SEQ ID NO: 158, a second heavy chain hypervariable region (HVR-H2) comprising the sequence of SEQ ID NO: 159, and a third heavy chain hypervariable region (HVR-H3) comprising the sequence of SEQ ID NO: 160, wherein the heavy chain further comprises Alanine residues at positions 234 and 235 according to the EU system of numbering.

[0012] In another preferred embodiment, the anti-IL-36 antibody may be one wherein: (a) each heavy chain comprises at least one modification selected from Q1E, M428L/N434S, YTE and a C-terminal Lysine, wherein the two heavy chains have the same modifications; and/or (b) one of the heavy chains has a “knob” modification T366W, optionally together with a S354C modification, and the other heavy chain a “hole” modification T366S/L368A/Y407V, optionally together with a Y349C modification.

[0013] In a further preferred embodiment the anti-IL-36 may be one wherein the heavy chain of (i) and the heavy chain of (ii) both comprise the same one of the following (a) to (x): (a) Q-LALA-LS-S354/Y349-KiH; (b) Q-LALA-LS-S354/Y349-HiK (inverse); (c) Q-LALA-LS-KiH; (d) Q-LALA-LS-HiK (inverse); (e) Q-LALA-YTE-S354/Y349-KiH; (f) Q-LALA-YTE-S354/Y349-HiK (inverse); (g) Q-LALA-YTE-KiH; (h) Q-LALA-YTE-HiK (inverse); (i) E-LALA-LS-S354/Y349-KiH; (j) E-LALA-LS-S354/Y349-HiK (inverse); (k) E-LALA-LS-KiH; (l) E-LALA-LS-HiK (inverse); (m) E-LALA-YTE-S354/Y349-KiH; (n) E-LALA-YTE-S354/Y349-HiK (inverse); (o) E-LALA-YTE-KiH; (p) E-LALA-YTE-HiK (inverse); (q) Q-LALA-S354/Y349-KiH; (r) Q-LALA-S354/Y349-HiK (inverse); (s) Q-LALA KiH; (t) Q-LALA HiK (inverse); (u) E-LALA-S354/Y349-KiH; (v) E-LALA-S354/Y349-HiK (inverse); (w) E-LALA KiH; and (x) E-LALA HiK (inverse); wherein:
[0014] “Q” is a Q at the N-terminal residue;
[0015] “E” is a Q1E modification with E as the N-terminal residue;
[0016] “LALA” is a L234A L235A modification;
[0017] “LS” is a M428L/N434S modification;
[0018] “YTE” is a M252Y S254T T256E modification;
[0019] “KiH” indicates that the heavy chain of (i) has a “knob” modification T366W and the heavy chain of (ii) has a “hole” modification
[0020] T366S/L368A/Y407V; and
[0021] “HiK (inverse)” indicates that the heavy chain of (i) has a “hole” modification T366S/L368A/Y407V and the heavy chain of (ii) has a “knob” modification T366W; and
   optionally wherein the heavy chains each comprise a C-terminal Lysine residue.

[0022] In one preferred embodiment, the anti-IL-36 antibody is one wherein the heavy chains of (i) and (ii) are one of the following pairs of SEQ ID Nos: 752/791; 753/790; 754/793; 755/792; 756/795; 757/794; 758/797; 759/796; 768/807; 769/806; 770/809; 771/808; 772/811; 773/810; 774/813; 775/812; 782/821; 783/820; 784/823; 785/822; 786/825; 787/824; and 788/827; and 789/826. In another preferred embodiment, the heavy chains may comprise a pair of heavy chains where each heavy chain has at least 90% sequence identity to one of those pairs of heavy chains, for instance over the variable regions, and more preferably over the full length of the heavy chains.

[0023] The present inventions further provides an anti-IL-36 antibody comprising: (i) a heavy chain comprising a heavy chain variable region comprising at least one of a heavy chain hypervariable region (HVR-H1) comprising the sequence of SEQ ID NO: 106, a second heavy chain hypervariable region (HVR-H2) comprising the sequence of SEQ ID NO: 107, and a third heavy chain hypervariable region (HVR-H3) comprising the sequence of SEQ ID NO: 108; and (ii) a heavy chain comprising a heavy chain variable region comprising at least one of a heavy chain hypervariable region (HVR-H1) comprising the sequence of SEQ ID NO: 158, a second heavy chain hypervariable region (HVR-H2) comprising the sequence of SEQ ID NO: 159, and a third heavy chain hypervariable region (HVR-H3) comprising the sequence of SEQ ID NO: 160; wherein the heavy chain of (i) and the heavy chain of (ii) both comprise the same one of the following (a) to (ll): (a) Q-LALA-LS-S354/Y349-KiH; (b) Q-LALA-LS-S354/Y349-HiK (inverse); (c) Q-LALA-LS-KiH; (d) Q-LALA-LS-HiK (inverse); (e) Q-LALA-YTE-S354/Y349-KiH; (f) Q-LALA-YTE-S354/Y349-HiK (inverse); (g) Q-LALA-YTE-KiH; (h) Q-LALA-YTE-HiK (inverse); (i) Q-N297G-LS-S354/Y349-KiH; (j) Q-N297G-LS-S354/Y349-HiK (inverse); (k) Q-N297G-LS-KiH; (1) Q-N297G-LS-HiK (inverse); (m) Q-N297G-YTE-S354/Y349-KiH; (n) Q-N297G-YTE-S354/Y349-HiK (inverse); (o) Q-N297G-YTE-KiH; (p) Q-N297G-YTE-HiK (inverse); (q) E-LALA-LS-S354/Y349-KiH; (r) E-LALA-LS-S354/Y349-HiK (inverse); (s) E-LALA-LS-KiH; (t) E-LALA-LS-HiK (inverse); (u) E-LALA-YTE-S354/Y349-KiH; (v) E-LALA-YTE-S354/Y349-HiK (inverse); (w) E-LALA-YTE-KiH; (x) E-LALA-YTE-HiK (inverse); (y) E-N297G-LS-S354/Y349-KiH; (z) E-N297G-LS-S354/Y349-HiK (inverse); (aa) E-N297G-LS-KiH; (bb) E-N297G-LS-HiK (inverse); (cc) E-N297G-YTE-S354/Y349-KiH; (dd) E-N297G-YTE-S354/Y349-HiK (inverse); (ee) Q-LALA-S354/Y349-KiH; (ff) Q-LALA-S354/Y349-HiK (inverse); (gg) Q-LALA KiH; (hh) Q-LALA HiK (inverse); (ii) E-LALA-S354/Y349-KiH; (jj) E-LALA-S354/Y349-HiK (inverse); (kk) E-LALA KiH; and (ll) E-LALA HiK (inverse), wherein: “Q” is a Q at the N-terminal residue; “E” is a Q1E modification with E as the N-terminal residue; “LALA” is a L234A L235A modification; “N297G” is a N297G modification; “LS” is a M428L/N434S modification; “YTE” is a M252Y S254T T256E modification; “KiH” indicates that the heavy chain of (i) has a “knob” modification T366W and the heavy chain of (ii) has a “hole” modification T366S/L368A/Y407V; and “HiK (inverse)” indicates that the heavy chain of (i) has a “hole” modification T366S/L368A/Y407V and the heavy chain of (ii) has a “knob” modification T366W, optionally where a C-terminal Lysine is present on the heavy chain of (i) and/or (ii).

[0024] In one preferred embodiment, the anti-IL-36 antibody comprises: (i) a heavy chain comprising a heavy chain variable region comprising a heavy chain hypervariable region (HVR-H1) comprising the sequence of SEQ ID NO: 106, a second heavy chain hypervariable region (HVR-H2) comprising the sequence of SEQ ID NO: 107, and a third heavy chain hypervariable region (HVR-H3) comprising the sequence of SEQ ID NO: 108; and (ii) a heavy chain comprising a heavy chain variable region comprising a heavy chain hypervariable region (HVR-H1) comprising the sequence of SEQ ID NO: 158, a second heavy chain hypervariable region (HVR-H2) comprising the sequence of SEQ ID NO: 159, and a third heavy chain hypervariable region (HVR-H3) comprising the sequence of SEQ ID NO: 160.

[0025] In a further preferred embodiment, the heavy chains of (i) and (ii) are one of the following pairs of SEQ ID Nos: 752/791; 753/790; 754/793; 755/792; 756/795; 757/794; 758/797; 759/796; 760/799; 761/798; 762/801; 763/800; 764/803; 765/802; 766/805; 767/804; 768/807; 769/806; 770/809; 771/808; 772/811; 773/810; 774/813; 775/812; 776/815; 777/814; 778/817; 779/816; 780/819; 781/818; 782/821; 783/820; 784/823; 785/822; 786/825; 787/824; 788/827; and 789/826. In another preferred embodiment, the heavy chains may comprise a pair of heavy chains where each heavy chain has at least 90% sequence identity to one of those pairs of heavy chains, for instance over the variable regions, and more preferably over the full length of the heavy chains.

[0026] In a further preferred embodiment an anti-IL-36 antibody of the invention: (a) comprises a light chain that pairs with both the heavy chain of (i) and the heavy chain of (ii); (b) comprises a light chain that pairs with the heavy chain of (i) to form an antigen-binding site for hu-IL-36β; and also pairs with the heavy chain of (ii) to form an antigen-binding site for hu-IL-36α and/or hu-IL-36γ; (c) comprises a light chain that comprises a first light chain hypervariable region (HVR-L1) having the sequence of SEQ ID NO: 18, a second light chain hypervariable region (HVR-L2) having the sequence of SEQ ID NO: 19, and a third light chain hypervariable region (HVR-L3) having the sequence of SEQ ID NO: 20; (d) comprises a light chain that comprises the light chain variable region of SEQ ID NO: 77 or 17; (e) comprises a light chain that comprises a light chain comprising the sequence of SEQ ID NO: 169, 242 or 246; or (f) is a bispecific antibody.

[0027] In a further preferred embodiment an anti-IL-36 antibody of the invention is: (a) a bispecific antibody that comprises one of the following combinations of two heavy and one light chain sequences: SEQ ID Nos: 752/791/246; 753/790/246; 756/795/246; 757/794/246; 768/807/169; 769/806/169; 772/811/169; 773/810/169; 774/813/169; and 775/812/169; (b) a bispecific antibody comprising a pair of heavy chain sequences selected from one of the following pairs of SEQ ID Nos: 752/791; 753/790; 756/795; 757/794; 758/797; and 759/796 and further comprises the light chain of SEQ ID No: 246; (c) a bispecific antibody comprising a pair of heavy chain sequences selected from one of the following pairs of SEQ ID Nos: 752/791; 753/790; 756/795; and 757/794 and further comprises the light chain of SEQ ID No: 246; or (d) a bispecific antibody comprising a pair of heavy chain sequences selected from one of the following pairs of SEQ ID Nos: 752/791; 756/795; 757/794; and 758/797 and further comprising the light chain of SEQ ID No: 246.

[0028] In some embodiments, the present invention provides an anti-IL-36 antibody comprising: (i) a first light chain hypervariable region (HVR-L1), a second light chain hypervariable region (HVR-L2), and a third light chain hypervariable region (HVR-L3), and/or (ii) a first heavy chain hypervariable region (HVR-H1), a second heavy chain hypervariable region (HVR-H2), and a third heavy chain hypervariable region (HVR-H3), wherein: (a) HVR-L1 comprises an amino acid sequence selected from TGSSSNIGAHYDVH (SEQ ID NO: 18), TGSSSNIGAGYDVH (SEQ ID NO: 22), RASQSVSSNYLA (SEQ ID NO: 38), or RASQTIYKYLN (SEQ ID NO: 42); (b) HVR-L2 comprises an amino acid sequence selected from SNNNRPS (SEQ ID NO: 15), GNDNRPS (SEQ ID NO: 19), GNTNRPS (SEQ ID NO: 23), GNRNRPS (SEQ ID NO: 27), SASSLQS (SEQ ID NO: 39), or AASSLQS (SEQ ID NO: 43); (c) HVR-L3 comprises an amino acid sequence selected from QSYDYSLRGYV (SEQ ID NO: 16), QSYDYSLSGYV (SEQ ID NO: 20), QSYDYSLRVYV (SEQ ID NO: 28), QSYDYSLKAYV (SEQ ID NO: 32), QSYDISLSGWV (SEQ ID NO: 36), QQTYSYPPT (SEQ ID NO: 40), or QQSSIPYT (SEQ ID NO: 44); (d) HVR-H1 comprises an amino acid sequence selected from SAYAMHW (SEQ ID NO: 46), STSSYYW (SEQ ID NO: 50), SSTSYYW (SEQ ID NO: 54), GSRSYYW (SEQ ID NO: 58), STYAMSW (SEQ ID NO: 62), TSSNYYW (SEQ ID NO: 66), SSYGMH (SEQ ID NO: 70), SNYAIS (SEQ ID NO: 74), TSTNYYW (SEQ ID NO: 82), TSSNAYW (SEQ ID NO: 86), TASNYYW (SEQ ID NO: 90), TASNTYW (SEQ ID NO: 106), SDSSYYW (SEQ ID NO: 122), SESSYYW (SEQ ID NO: 126), STSSDYW (SEQ ID NO: 130), SNSSYYW (SEQ ID NO: 134), STSSYHW (SEQ ID NO: 142), SRSSYYW (SEQ ID NO: 146), XXXNXYX (SEQ ID NO: 251) wherein X at position 1 is T, D, E, or N; X at position 2 is S, A, E, G, K, Q, R, or T; X at position 3 is S, A, D, E, G, N, P, Q, or T; X at position 5 is Y, A, E, G, H, M, N, Q, S, T, or V; X at position 7 is W, F, I, V, or Y, or XXXXXXW (SEQ ID NO: 336) wherein X at position 1 is S or D; X at position 2 is T, A, D, E, G, H, K, N, P, Q, R, or S; X at position 3 is S, D, E, G, K, N, P, or R; X at position 4 is S, G, K, N, or P; X at position 5 is Y, A, D, E, G, H, M, N, Q, S, T, V, or W; X at position 6 is Y, A, F, G, H, M, N, or Q; (e) HVR-H2 comprises an amino acid sequence selected from VISYDGTNEYYAD (SEQ ID NO: 47), SIYYTGNTYYNP (SEQ ID NO: 51), SIHYSGNTYYNP (SEQ ID NO: 55), SIHYSGTTYYNP (SEQ ID NO: 59), GISGGSGYTYYAD (SEQ ID NO: 63), SIDYTGSTYYNP (SEQ ID NO: 67), VISYGGSERYYAD (SEQ ID NO: 71), GILPILGTVDYAQ (SEQ ID NO: 75), NIDYTGSTYYNA (SEQ ID NO: 83), SIDYTGSTAYNP (SEQ ID NO: 87), SIDYTGSTYYNT (SEQ ID NO: 91), SIDYTGSTYYEP (SEQ ID NO: 99), SIDYTGSTYYEP (SEQ ID NO: 103), SIDYTGSTYYQP (SEQ ID NO: 119), SIYYTGNTYYNS (SEQ ID NO: 123), SIYYTGNTYYLP (SEQ ID NO: 131), SIYYTGNTYYMP (SEQ ID NO: 143), SIYYTGNTYYWP (SEQ ID NO: 147), SIYYTGETYYAP (SEQ ID NO: 151), XXDXXXXXXYXX (SEQ ID NO: 284) wherein X at position 1 is S, N, or T; X at position 2 is I, M, or V; X at position 4 is Y, or H; X at position 5 is T, H, L, or N; X at position 6 is G, A, D, E, H, K, N, Q, R, S, or T; X at position 7 is S, A, D, Q, or T; X at position 8 is T, A, D, or E; X at position 9 is Y, A, F, Q, S, or W; X at position 11 is N, D, E, H, P, or Q; X at position 12 is P, A, or E, or XXXXXXXXXYXP (SEQ ID NO: 379) wherein X at position 1 is S, F, I, M, or Q; X at position 2 is I, A, G, L, R, S, T, or V; X at position 3 is Y, A, D, E, F, G, H, K, L, M, N, P, Q, R, S, T, or W; X at position 4 is Y, A, D, E, F, G, H, K, N, P, Q, R, S, T, or W; X at position 5 is T, D, E, K, N, P, or Q; X at position 6 is G or Q; X at position 7 is N, D, E, G, H, I, K, M, P, R, or S; X at position 8 is T, A, E, F, G, H, K, P, Q, R, S, V, W, or Y; X at position 9 is Y or W; X at position 11 is N, A, D, E, K, L, M, P, Q, S or T; and (f) HVR-H3 comprises an amino acid sequence selected from ARGIRIFTSYFDS (SEQ ID NO: 48), ARVRYGVGVPRYFDP (SEQ ID NO: 52), ARVHYGGYIPRRFDH (SEQ ID NO: 56), ARVAPSYPRVFDY (SEQ ID NO: 60), ARVVTYRDPPASFDY (SEQ ID NO: 64), ARGKYYETYLGFDV (SEQ ID NO: 68), AREPWYSSRGWTGYGFDV (SEQ ID NO: 72), AREPWYRLGAFDV (SEQ ID NO: 76), ATGKYYETYLGFDV (SEQ ID NO: 84), AHGKYYETYLGFDV (SEQ ID NO: 88), ATGSYYETYLGFDV (SEQ ID NO: 100), ATGNYYETYLGFDV (SEQ ID NO: 104), ASGKYYETYLGFDV (SEQ ID NO: 112), ARGNYYETYLGFDV (SEQ ID NO: 120), AGVRYGVGVPRYFDP (SEQ ID NO: 128), SRVRYGVGVPRYFDP (SEQ ID NO: 132), VRVRYGVGVPRYFDP (SEQ ID NO: 144), TRVRYGVGVPRYFDP (SEQ ID NO: 148), ARLRYGVGVPRYFDP (SEQ ID NO: 152), ARVKYGVGVPRYFDP (SEQ ID NO: 156), ARVRYGVGVPRHFDP (SEQ ID NO: 160), AXGXYYXTYLGFDV (SEQ ID NO: 322) wherein X at position 2 is R, A, E, G, H, M, N, Q, S, T, or Y; X at position 4 is K, A, or S; X at position 7 is E or T, or XXXXXGXXVPRXFDP (SEQ ID NO: 462) wherein X at position 1 is A or V; X at position 2 is R, A, G, N, Q, or T; X at position 3 is V, A, F, I, K, L, M, Q, or S; X at position 4 is R, A, I, K, L, M, P, Q, 5, T, or V; X at position 5 is Y, H, I, L, or V; X at position 7 is V, A, F, G, K, M, N, Q, R, S, T, W, or Y; X at position 8 is G, N, R, S, or T; X at position 12 is Y, F, H, I, L, M, Q, or R.

[0029] In one embodiment such an antibody of the invention may further comprise any of the specific modifications set out herein, particularly the heavy chain modifications set out herein, and in particular the LALA modification discussed herein.

[0030] In some embodiments, the anti-IL-36 antibody comprises: (a) HVR-L1 comprising the amino acid sequence of SEQ ID NO: 18; (b) HVR-L2 comprising the amino acid sequence of SEQ ID NO: 19; and (c) HVR-L3 comprising the amino acid sequence of SEQ ID NO: 20.

[0031] In some embodiments, the anti-IL-36 antibody comprises: (d) HVR-H1 comprises the amino acid sequence selected from SEQ ID NO: 66, 82, 86, 90, or 252-283; (e) HVR-H2 comprises the amino acid sequence selected from SEQ ID NO: 67, 83, 87, 91, 99, 103, 119, or 285-321; and (f) HVR-H3 comprises the amino acid sequence selected from SEQ ID NO: 68, 84, 88, 100, 104, 112, 120, or 323-335.

[0032] In some embodiments, the anti-IL-36 antibody comprises: (d) HVR-H1 comprises an amino acid sequence selected from SEQ ID NO: 50, 122, 126, 130, 134, 138, 142, 146, or 337-378; (e) HVR-H2 comprises an amino acid sequence selected from SEQ ID NO: 51, 123, 131, 143, 147, 151, or 380-461; and (f) HVR-H3 comprises an amino acid sequence selected from SEQ ID NO: 52, 128, 132, 144, 148, 152, 156, 160, or 463-513.

[0033] In some embodiments, the anti-IL-36 antibody comprises: (a) HVR-L1 comprises the amino acid sequence of SEQ ID NO: 18; (b) HVR-L2 comprises the amino acid sequence of SEQ ID NO: 19; (c) HVR-L3 comprises the amino acid sequence of SEQ ID NO: 20; (d) HVR-H1 comprises the amino acid sequence selected from SEQ ID NO: 66, 82, 86, 90, or 252-283; (e) HVR-H2 comprises the amino acid sequence selected from SEQ ID NO: 67, 83, 87, 91, 99, 103, 119, or 285-321; and (f) HVR-H3 comprises the amino acid sequence selected from SEQ ID NO: 68, 84, 88, 100, 104, 112, 120, or 323-335.

[0034] In some embodiments, the anti-IL-36 antibody comprises: (a) HVR-L1 comprises the amino acid sequence of SEQ ID NO: 18; (b) HVR-L2 comprises the amino acid sequence of SEQ ID NO: 19; (c) HVR-L3 comprises the amino acid sequence of SEQ ID NO: 20; (d) HVR-H1 comprises an amino acid sequence selected from SEQ ID NO: 50, 122, 126, 130, 134, 138, 142, 146, or 337-378; (e) HVR-H2 comprises an amino acid sequence selected from SEQ ID NO: 51, 123, 131, 143, 147, 151, or 380-461; and (f) HVR-H3 comprises an amino acid sequence selected from SEQ ID NO: 52, 128, 132, 144, 148, 152, 156, 160, or 463-513.

[0035] In some embodiments, the anti-IL-36 antibody comprises a light chain variable domain (V_{L}) amino acid sequence having at least 90% identity to a sequence selected from SEQ ID NO: 13, 17, 21, 25, 29, 33, 37, 41, 77, or 78; and/or a heavy chain variable domain (V_{H}) amino acid sequence having at least 90% identity to a sequence selected from SEQ ID NO: 45, 49, 53, 57, 61, 65, 69, 73, 79, 80, 81, 85, 89, 93, 97, 101, 105, 109, 113, 117, 121, 125, 129, 133, 137, 141, 145, 149, 153, 157, 161, or 165. In some embodiments, the anti-IL-36 antibody comprises a light chain variable domain (V_{L}) amino acid sequence selected from SEQ ID NO: 13, 17, 21, 25, 29, 33, 37, 41, 77, or 78; and/or a heavy chain variable domain (V_{H}) amino acid sequence selected from SEQ ID NO: 45, 49, 53, 57, 61, 65, 69, 73, 79, 80, 81, 85, 89, 93, 97, 101, 105, 109, 113, 117, 121, 125, 129, 133, 137, 141, 145, 149, 153, 157, 161, or 165.

[0036] In some embodiments, the anti-IL-36 antibody comprises a light chain variable domain (V_{L}) amino acid sequence having at least 90% identity to SEQ ID NO: 17 or 77; and/or a heavy chain variable domain (V_{H}) amino acid sequence having at least 90% identity to a sequence selected from SEQ ID NO: 49, 65, 79, 80, 81, 85, 89, 93, 97, 101, 105, 109, 113, 117, 121, 125, 129, 133, 137, 141, 145, 149, 153, 157, 161, or 165. In some embodiments, the anti-IL-36 antibody comprises a light chain variable domain (V_{L}) amino acid sequence of SEQ ID NO: 17 or 77; and/or a heavy chain variable domain (V_{H}) amino acid sequence selected from SEQ ID NO: 49, 65, 79, 80, 81, 85, 89, 93, 97, 101, 105, 109, 113, 117, 121, 125, 129, 133, 137, 141, 145, 149, 153, 157, 161, or 165.

[0037] In some embodiments, the anti-IL-36 antibody comprises a light chain variable domain (V_{L}) amino acid sequence having at least 90% identity to SEQ ID NO: 17 or 77; and/or a heavy chain variable domain (V_{H}) amino acid sequence having at least 90% identity to a sequence selected from SEQ ID NO: 65, 80, 81, 85, 89, 93, 97, 101, 105, 109, 113, or 117. In some embodiments, the anti-IL-36 antibody comprises a light chain variable domain (V_{L}) amino acid sequence of SEQ ID NO: 17 or 77; and/or a heavy chain variable domain (V_{H}) amino acid sequence selected from SEQ ID NO: 65, 80, 81, 85, 89, 93, 97, 101, 105, 109, 113, or 117.

[0038] In some embodiments, the anti-IL-36 antibody comprises a light chain variable domain (V_{L}) amino acid sequence having at least 90% identity to SEQ ID NO: 17 or 77; and/or a heavy chain variable domain (V_{H}) amino acid sequence having at least 90% identity to a sequence selected from SEQ ID NO: 49, 79, 121, 125, 129, 133, 137, 141, 145, 149, 153, 157, 161, or 165. In some embodiments, the anti-IL-36 antibody comprises a light chain variable domain (V_{L}) amino acid sequence of SEQ ID NO: 17 or 77; and/or a heavy chain variable domain (V_{H}) amino acid sequence selected from SEQ ID NO: 49, 79, 121, 125, 129, 133, 137, 141, 145, 149, 153, 157, 161, or 165.

[0039] In some embodiments, the anti-IL-36 antibody comprises a light chain (LC) amino acid sequence having at least 90% identity to SEQ ID NO: 169 or 242; and/or a heavy chain (HC) amino acid sequence having at least 90% identity to a sequence selected from SEQ ID NO: 170-202, 248, 249, or 250. In some embodiments, the anti-IL-36 antibody comprises a light chain (LC) amino acid sequence of SEQ ID NO: 169 or 242; and/or a heavy chain (HC) amino acid sequence selected from SEQ ID NO: 170-202, 248, 249, or 250.

[0040] In some embodiments, the anti-IL-36 antibody comprises a light chain (LC) amino acid sequence having at least 90% identity to SEQ ID NO: 169 or 242; and/or a heavy chain (HC) amino acid sequence having at least 90% identity to a sequence selected from SEQ ID NO: 518-616, and 743-751. In some embodiments, the anti-IL-36 antibody comprises a light chain (LC) amino acid sequence of SEQ ID NO: 169 or 242; and/or a heavy chain (HC) amino acid sequence of SEQ ID NO: 518-616, and 743-751.

[0041] In some embodiments, the anti-IL-36 antibody comprises a light chain (LC) amino acid sequence having at least 90% identity to SEQ ID NO: 169 or 242; and/or a heavy chain (HC) amino acid sequence having at least 90% identity to a sequence selected from SEQ ID NO: 203-241. In some embodiments, the anti-IL-36 antibody comprises a light chain (LC) amino acid sequence having of SEQ ID NO: 169 or 242; and/or a heavy chain (HC) amino acid sequence selected from SEQ ID NO: 203-241.

[0042] In some embodiments, the anti-IL-36 antibody comprises a light chain (LC) amino acid sequence having at least 90% identity to SEQ ID NO: 169 or 242; and/or a heavy chain (HC) amino acid sequence having at least 90% identity to a sequence selected from SEQ ID NO: 617-733. In some embodiments, the anti-IL-36 antibody comprises a light chain (LC) amino acid sequence having of SEQ ID NO: 169 or 242; and/or a heavy chain (HC) amino acid sequence selected from SEQ ID NO: 617-733.

[0043] In some embodiments, the present disclosure provides an anti-IL-36 antibody wherein the antibody is a multispecific antibody comprising: (a) a pair of light chains each comprising: HVR-L1 sequence of SEQ ID NO: 18; HVR-L2 sequence of SEQ ID NO: 19; and HVR-L3 sequence of SEQ ID NO: 20; (b) a heavy chain comprising: HVR-H1 sequence selected from SEQ ID NOs: 66, 82, 86, 90, or 106; HVR-H2 sequence selected from SEQ ID NOs: 67, 83, 87, 91, 99, 103, or 119; and HVR-H3 sequence selected from SEQ ID NOs: 68, 84, 88, 100, 104, 112, or 120; and (c) a heavy chain comprising: HVR-H1 sequence selected from SEQ ID NOs: 50, 122, 126, 130, 134, 142, or 146; HVR-H2 sequence selected from SEQ ID NOs: 51, 123, 127, 131, 135, 139, 143, 147, or 151; and HVR-H3 comprises an amino acid sequence selected from SEQ ID NOs: 52, 128, 132, 144, 148, 152, 156, or 160.

[0044] In some embodiments, the multispecific antibody comprises: one of the heavy chains comprising an amino acid substitution T366W, and the other heavy chain comprising amino acid substitutions T366S, L368A and Y407V.

[0045] In some embodiments, the multispecific antibody comprises: (a) a pair of light chains each comprising a light chain variable domain (V_{L}) amino acid sequence of SEQ ID NO: 17 or 77; (b) a heavy chain comprising a heavy chain variable domain (V_{H}) amino acid sequence selected from SEQ ID NO: 65, 80, 81, 85, 89, 93, 97, 101, 105, 109, 113, or 117; and (c) a heavy chain comprising a heavy chain variable domain (V_{H}) amino acid sequence selected from SEQ ID NO: 49, 79, 121, 125, 129, 133, 137, 141, 145, 149, 153, 157, 161, or 165.

[0046] In some embodiments, the multispecific antibody comprises: (a) a pair of light chain (LC) amino acid sequences of SEQ ID NO: 169 and 242; (b) a heavy chain (HC) amino acid sequence selected from SEQ ID NO: 171, 174,177, 180, 183, 186, 189, 192, 195, 198, 201, 249, 521, 522, 523, 530, 531, 532, 539, 540, 541, 548, 549, 550, 557, 558, 559, 566, 567, 568, 575, 576, 577, 584, 585, 586, 593, 594, 595, 602, 603, 604, 611, 612, and 613; and (c) a heavy chain (HC) amino acid sequence selected from SEQ ID NO: 208, 211, 214, 217, 220, 223, 226, 229, 232, 235, 238, 241, 632, 633, 634, 641, 642, 643, 650, 651, 652, 659, 660, 661, 668, 669, 670, 677, 678, 679, 686, 687, 688, 695, 696, 697, 704, 705, 706, 713, 714, 715, 722, 723, 724, 731, 732, and 733.

[0047] In some embodiments, the multispecific antibody comprises: (a) a pair of light chain (LC) amino acid sequences of SEQ ID NO: 169 and 242; (b) a heavy chain (HC) amino acid sequence selected from SEQ ID NO: 172, 175, 178, 181, 184, 187, 190, 193, 196, 199, 202, 250, 524, 525, 526, 533, 534, 535, 542, 543, 544, 551, 552, 553, 560, 561, 562, 569, 570, 571, 578, 579, 580, 587, 588, 589, 596, 597, 598, 605, 606, 607, 614, 615, 616, 749, 750, and 751; and (c) a heavy chain (HC) amino acid sequence selected from SEQ ID NO: 207, 210, 213, 216, 219, 222, 225, 228, 231, 234, 237, 240, 629, 630, 631, 638, 639, 640, 647, 648, 649, 656, 657, 658, 665, 666, 667, 674, 675, 676, 683, 684, 685, 692, 693, 694, 701, 702, 703, 710, 711, 712, 719, 720, 721, 728, 729, and 730.

[0048] In some embodiments, the present invention provides a multispecific anti-IL-36 antibody, wherein the antibody comprises a pair of light chain (LC) amino acid sequences of SEQ ID NO: 169; a heavy chain (HC) amino acid sequence selected from SEQ ID NO: 192, 584, 585, and 586; and a heavy chain (HC) amino acid sequence selected from SEQ ID NO: 235, 713, 714, and 715.

[0049] In various embodiments of the anti-IL-36 antibodies provided by the present invention, the antibody is characterized by one or more of the following properties: (a) binds to hu-IL-36α, hu-IL-36β, and/or hu-IL-36γ with a binding affinity of 1×10⁻⁸ M or less, 1×10⁻⁹ M or less, 1×10⁻¹⁰ M or less, or 1×10⁻¹¹ M or less; optionally, wherein the antibody is multispecific; (b) binds to hu-IL-36α and hu-IL-36γ with a binding affinity of 1×10⁻⁸ M or less, 1×10⁻⁹ M or less, 1×10⁻¹⁰ M or less, or 1×10⁻¹¹ M or less; (c) binds to hu-IL-36β with a binding affinity of 1×10⁻⁸ M or less, 1×10⁻⁹ M or less, 1×10⁻¹⁰ M or less, or 1×10⁻¹¹ M or less; (d) is multispecific and comprises a specificity for IL-36α and/or IL-36γ in one arm, and a specificity for IL-36β in the other arm; optionally, wherein one arm binds to hu-IL-36α and hu-IL-36γ with a binding affinity of 1×10⁻⁸ M or less, 1×10⁻⁹ M or less, 1×10⁻¹⁰ M or less, or 1×10⁻¹¹ M or less, and the other arm binds to hu-IL-36β with a binding affinity of 1×10⁻⁸ M or less, 1×10⁻⁹ M or less, 1×10⁻¹⁰ M or less, or 1×10⁻¹¹ M or less; (e) decreases an intracellular signal stimulated by IL-36α, IL-36β, and/or IL-36γ by at least 90%, at least 95%, at least 99%, or 100%; optionally, wherein at an IL-36α, IL-36β, and/or IL-36γ concentration of about EC₅₀ the antibody has an IC₅₀ of 10 nM or less, 5 nM or less, or 1 nM or less; optionally, wherein the antibody is multispecific; (f) inhibits release of IL-8 from primary human keratinocytes (PHKs) stimulated by IL-36α, IL-36β, and/or IL-36γ, optionally, wherein at an IL-36α, IL-36β, and/or IL-36γ concentration of about EC₅₀ the antibody has an IC₅₀ of 10 nM or less, 5 nM or less, or 1 nM or less; optionally, wherein the antibody is multispecific; and/or (g) cross-reacts with an IL-36α, IL-36β, or IL-36γ of cynomolgus monkey of SEQ ID NO: 5, 6, or 7; optionally, wherein the antibody is multispecific.

[0050] The present invention also provides embodiments of the anti-IL-36 antibody, wherein: (i) the antibody is a monoclonal antibody; (ii) the antibody is a human, humanized, or chimeric antibody; (iii) the antibody is a full length antibody of class IgG, optionally, wherein the class IgG antibody has an isotype selected from IgG1, IgG2, IgG3, and IgG4; (iv) the antibody is an Fc region variant, optionally an Fc region variant that alters effector function (e.g., a variant resulting in an effectorless antibody), or an Fc region variant the alters antibody half-life; (v) the antibody is an antibody fragment, optionally selected from the group consisting of F(ab′)₂, Fab′, Fab, Fv, single domain antibody (VHH), and scFv; (vi) the antibody is an immunoconjugate, optionally, wherein the immunoconjugate comprises a therapeutic agent for treatment of an IL-36-mediated disease; (vii) the antibody is a multi-specific antibody, optionally a multispecific antibody; and (viii) the antibody is a synthetic antibody, wherein the HVRs are grafted onto a scaffold or framework other than an immunoglobulin scaffold or framework; optionally, a scaffold selected from an alternative protein scaffold and an artificial polymer scaffold. In one particularly preferred embodiment, the antibody is full length bispecific antibody.

[0051] In other embodiments, the present invention provides isolated nucleic acids encoding the anti-IL-36 antibodies provided herein. In some embodiments, the present invention also provides a host cell comprising a nucleic acid encoding an anti-IL-36 antibody of the invention. The invention also provides a method of producing an anti-IL-36 antibody, wherein the method comprises culturing a host cell comprising a nucleic acid (or vector) encoding an anti-IL-36 antibody so that an antibody is produced.

[0052] In some embodiments, the invention provides a pharmaceutical composition comprising an anti-IL-36 antibody as disclosed herein and a pharmaceutically acceptable carrier. In some embodiments, the pharmaceutical composition comprises an anti-IL-36 antibody as the sole active agent; optionally, wherein the anti-IL-36 antibody is a multispecific antibody comprising a specificity for IL-36α and/or IL-36γ in one arm, and a specificity for IL-36β in the other arm. In some embodiments, the pharmaceutical composition further comprises a therapeutic agent for treatment of an IL-36-mediated disease or condition.

[0053] In some embodiments, the present invention provides a method of treating an IL-36-mediated disease or condition in a subject, comprising administering to the subject a therapeutically effective amount of an anti-IL-36 antibody as disclosed herein, or a therapeutically effective amount of a pharmaceutical composition of an anti-IL-36 antibody as disclosed herein. In some embodiments, the uses and methods of treatment comprise administering a pharmaceutical composition comprising an anti-IL-36 antibody as the sole active agent; optionally, wherein the anti-IL-36 antibody is a multispecific antibody comprising a specificity for IL-36α and/or IL-36γ in one arm, and a specificity for IL-36β in the other arm.

[0054] In some embodiments of the uses and methods of treatment disclosed herein, the IL-36-mediated disease is selected from an inflammatory disease, an autoimmune disease, and a cancer. In some embodiments, the IL-36-mediated disease is selected from: acne due to epidermal growth factor receptor inhibitors, acne and suppurative hidradenitis (PASH), acute generalized exanthematous pustulosis (AGEP), amicrobial pustulosis of the folds, amicrobial pustulosis of the scalp/leg, amicrobial subcorneal pustulosis, aseptic abscess syndrome, Behget's disease, bowel bypass syndrome, chronic obstructive pulmonary disease (COPD), childhood pustular dermatosis, Crohn's disease, deficiency of the interleukin-1 receptor antagonist (DIRA), deficiency of interleukin-36 receptor antagonist (DITRA), eczema, generalized pustular psoriasis (GPP), erythema elevatum diutinum, hidradenitis suppurativa, IgA pemphigus, inflammatory bowel disease (IBD), neutrophilic panniculitis, palmoplantar pustular psoriasis (PPP), psoriasis, psoriatic arthritis, pustular psoriasis (DIRA, DITRA), pyoderma gangrenosum, pyogenic arthritis pyoderma gangrenosum and acne (PAPA), pyogenic arthritis pyoderma gangrenosum acne and suppurative hidradenitis (PAPASH), rheumatoid neutrophilic dermatosis, synovitis acne pustulosis hyperostosis and osteitis (SAPHO), TNF-induced psoriasis form skin lesions in Crohn's patients, Sjogren's syndrome, Sweet's syndrome, systemic lupus erythematosus (SLE), ulcerative colitis, and uveitis. In some embodiments, the IL-36-mediated disease is selected from generalized pustular psoriasis (GPP), palmoplantar pustular psoriasis (PPP), and psoriasis. In some embodiments, the IL-36-mediated disease is a cancer; optionally, a cancer selected from breast cancer, colorectal cancer, non-small cell lung cancer, and pancreatic cancer.

### BRIEF DESCRIPTION OF THE FIGURES

[0055] FIG. 1A, FIG. 1B, and FIG. 1C depict plots of results for the yeast display-derived anti-hu-IL-36 antibodies mAb2.0 and mAb6.0 in inhibition assays of IL-36-stimulated intracellular signaling in the HaCat human keratinocyte cell line. FIG. 1A: mAb2.0 inhibition of IL-36α stimulation ([IL-36α]=1.2 nM) of HaCat cells; IC₅₀=0.28 nM. FIG. 1B: mAb6.0 inhibition of IL-36β stimulation ([IL-36β]=0.175 nM) of HaCat cells; IC₅₀=0.082 nM. FIG. 1C: mAb2.0 inhibition of IL-36γ stimulation ([IL-36γ ]=4 nM) of HaCat cells; IC₅₀=1.23 nM. All assays were performed at an agonist concentration of about EC₅₀; error bars shown are representative of the standard deviation from duplicate samples. The negative control (NC, shown as a grey, dotted line), represents cells exposed to growth medium only, while the positive control (PC, shown as a grey, dashed line) represents cells exposed to the agonist only (in the absence of antagonistic or control antibodies).

[0056] FIG. 2A, FIG. 2B, and FIG. 2C depict plots of results for the yeast display-derived anti-hu-IL-36 antibodies mAb2.0 and mAb6.0 in inhibition assays of IL-36-stimulated intracellular signaling in primary human neonatal pooled keratinocytes (HEKn). FIG. 2A: mAb2.0 inhibition of IL-36α stimulation ([IL-36α]=1.2 nM) of HEKn cells; IC₅₀=0.33 nM. FIG. 2B: mAb6.0 inhibition of IL-36β stimulation ([IL-36β]=0.3 nM) of HEKn cells; IC₅₀=1.75 nM. FIG. 2C: mAb2.0 inhibition of IL-36γ stimulation ([IL-36γ ]=7 nM) of HEKn cells; IC₅₀=2.27 nM. All assays were performed at an agonist concentration of about EC₅₀; error bars shown are representative of the standard deviation from duplicate samples. The negative control (NC, shown as a grey, dotted line), represents cells exposed to growth medium only, while the positive control (PC, shown as a grey, dashed line) represents cells exposed to the agonist only (in the absence of antagonistic or control antibodies).

[0057] FIG. 3A, FIG. 3B, and FIG. 3C depict plots of results for the anti-hu-IL-36 multispecific antibody mAb2.10/mAb6_2.7 in inhibition assays of IL-36-stimulated intracellular signaling in the HaCat human keratinocyte cell line. FIG. 3A: mAb2.10/mAb6_2.7 inhibition of IL-36α stimulation ([IL-36α]=0.8 nM) of HaCat cells; IC₅₀=0.38 nM. FIG. 3B: mAb2.10/mAb6_2.7 inhibition of IL-36β stimulation ([IL-36β]=0.15 nM) of HaCat cells; IC₅₀=0.13 nM. FIG. 3C: mAb2.10/mAb6_2.7 inhibition of IL-36γ stimulation ([IL-36γ ]=2 nM) of HaCat cells; IC₅₀=1.1 nM. All assays were performed at an agonist concentration of about EC₅₀; error bars shown are representative of the standard deviation from duplicate samples. The negative control (NC, shown as a grey, dotted line), represents cells exposed to growth medium only, while the positive control (PC, shown as a grey, dashed line) represents cells exposed to the agonist only (in the absence of antagonistic or control antibodies).

[0058] FIG. 4A, FIG. 4B, and FIG. 4C depict plots of results for the anti-hu-IL-36 multispecific antibody mAb2.10/mAb6_2.7 in inhibition assays of IL-36-stimulated intracellular signaling in primary human adult keratinocytes (HEKa). FIG. 4A: mAb2.10/mAb6_2.7 inhibition of IL-36α stimulation ([IL-36α]=1.1 nM) of HEKa cells; IC₅₀=0.56 nM. FIG. 4B: mAb2.10/mAb6_2.7 inhibition of IL-36β stimulation ([IL-36β]=0.15 nM) of HEKa cells; IC₅₀=0.11 nM. FIG. 4C: mAb2.10/mAb6_2.7 inhibition of IL-36γ stimulation ([IL-36γ ]=3.6 nM) of HEKa cells; IC₅₀=2.7 nM. All assays were performed at an agonist concentration of about EC₅₀; error bars shown are representative of the standard deviation from duplicate samples. The negative control (NC, shown as a grey, dotted line), represents cells exposed to growth medium only, while the positive control (PC, shown as a grey, dashed line) represents cells exposed to the agonist only (in the absence of antagonistic or control antibodies).

[0059] FIG. 5 provides the amino acid sequences of various preferred heavy chain sequences of antibodies of the invention. The initial shaded region shows the variable region of the heavy chain, with the HVR regions shown in bold according to Kabat numbering. The subsequent shaded residues outside the variable regions show the locations of particular heavy chain modifications.

[0060] FIG. 6 provides the amino acid sequences of two preferred light chain sequences of the invention. The initial shaded region shows the variable region of the heavy chain, with the HVR regions shown in bold according to Kabat numbering.

[0061] FIGS. 7A and 7B shows the results of DSC stability assessment for different heavy chain modifications. In particular, FIG. 7A shows the results of DSC stability assessment for the following heavy chain modifications using the parameters/conditions listed under Method 1 in Table 17: LALA-YTE (PUR3685), N297G (LAS39328, PUR3677), and N297G+YTE (LAS39329, PUR3678). FIG. 7B shows the results of DSC stability assessment for the following heavy chain modifications using the parameters/conditions listed under Method 2 in Table 17: E-N297G-LS-KiH, E-LALA-YTE-KiH, E-LALA-YTE-S-S-KiH and E-LALA-YTE-S-S inverse KiH.

### DETAILED DESCRIPTION OF THE INVENTION

[0062] The present disclosure provides antibodies, including multispecific antibodies, that specifically bind human the hu-IL-36 cytokines, IL-36α, IL-36β, and IL-36γ with high affinity. In an especially preferred embodiment of the invention, the antibody provided is a bispecific antibody. Hence, in any of the embodiments disclosed herein, unless otherwise stated, the antibody may be a bispecific antibody and in particular one against IL-36β and also IL-36α and/or IL-36γ. In a particular preferred embodiment of the invention the antibody can bind all three of IL-36β, IL-36α and IL-36γ, with one arm specifically binding IL-36β and the other arm specifically binding IL-36α and IL-36γ. The anti-IL-36 antibodies are typically capable of decreasing, inhibiting, and/or fully-blocking intracellular signaling by IL-36-mediated pathways, including signaling stimulated by binding of IL-36α, IL-36β, or IL-36γ to its cognate receptor, IL-36R. The present disclosure also provides uses of the anti-IL-36 antibodies in methods of treating IL-36-mediated diseases, such as inflammatory diseases, autoimmune diseases, and cancers, specifically including, but not limited to acute generalized exanthematous pustulosis (AGEP), chronic obstructive pulmonary disease (COPD), childhood pustular dermatosis, eczema, generalized pustular psoriasis (GPP), inflammatory bowel disease (IBD), palmoplantar pustular psoriasis (PPP), psoriasis, TNF-induced psoriasis form skin lesions in Crohn's patients, Sjogren's syndrome, uveitis. The antibodies may also be used to perform both in vivo and in vitro detection of IL-36, including for diagnosing conditions where levels of IL-36 are indicative.

### Overview of Terminology and Techniques

[0063] For the descriptions herein and the appended claims, the singular forms “a”, and “an” include plural referents unless the context clearly indicates otherwise. Thus, for example, reference to “a protein” includes more than one protein, and reference to “a compound” refers to more than one compound. It is further noted that the claims may be drafted to exclude any optional element. As such, this statement is intended to serve as antecedent basis for use of such exclusive terminology as “solely,” “only” and the like in connection with the recitation of claim elements, or use of a “negative” limitation. The use of “comprise,” “comprises,” “comprising” “include,” “includes,” and “including” are interchangeable and not intended to be limiting. It is to be further understood that where descriptions of various embodiments use the term “comprising,” those skilled in the art would understand that in some specific instances, an embodiment can be alternatively described using language “consisting essentially of” or “consisting of.”

[0064] Where a range of values is provided, unless the context clearly dictates otherwise, it is understood that each intervening integer of the value, and each tenth of each intervening integer of the value, unless the context clearly dictates otherwise, between the upper and lower limit of that range, and any other stated or intervening value in that stated range, is encompassed within the invention. The upper and lower limits of these smaller ranges may independently be included in the smaller ranges, and are also encompassed within the invention, subject to any specifically excluded limit in the stated range. Where the stated range includes one or both of these limits, ranges excluding (i) either or (ii) both of those included limits are also included in the invention. For example, “1 to 50,” includes “2 to 25,” “5 to 20,” “25 to 50,” “1 to 10,” etc.

[0065] Generally, the nomenclature used herein and the techniques and procedures described herein include those that are well understood and commonly employed by those of ordinary skill in the art, such as the common techniques and methodologies described in Sambrook et al., Molecular Cloning-A Laboratory Manual (2nd Ed.), vols. 1-3, Cold Spring Harbor Laboratory, Cold Spring Harbor, N.Y., 1989 (hereinafter “Sambrook”); Current Protocols in Molecular Biology, F. M. Ausubel et al., eds., Current Protocols, a joint venture between Greene Publishing Associates, Inc. and John Wiley & Sons, Inc. (supplemented through 2011) (hereinafter “Ausubel”); Antibody Engineering, vols. 1 and 2, R. Kontermann and S. Dubel, eds., Springer-Verlag, Berlin and Heidelberg (2010); Monoclonal Antibodies: Methods and Protocols, V. Ossipow and N. Fischer, eds., 2nd Ed., Humana Press (2014); Therapeutic Antibodies: From Bench to Clinic, Z. An, ed., J. Wiley & Sons, Hoboken, N.J. (2009); and Phage Display, Tim Clackson and Henry B. Lowman, eds., Oxford University Press, United Kingdom (2004).

[0066] All publications, patents, patent applications, and other documents referenced in this disclosure are hereby incorporated by reference in their entireties for all purposes to the same extent as if each individual publication, patent, patent application or other document were individually indicated to be incorporated by reference herein for all purposes.

[0067] Unless defined otherwise, all technical and scientific terms used herein have the same meaning as commonly understood by one of ordinary skill in the art to which the present invention pertains. It is to be understood that the terminology used herein is for describing particular embodiments only and is not intended to be limiting. For purposes of interpreting this disclosure, the following description of terms will apply and, where appropriate, a term used in the singular form will also include the plural form and vice versa.

[0068] “IL-36,” as used herein, refers to the interleukin-36 cytokines IL-36α, IL-36β, and IL-36γ, collectively. In a particularly preferred embodiment, the IL-36 is human.

[0069] “IL-36α” or “IL-36α” as used herein, refers to the interleukin-36α cytokine from any species in which it occurs. “hu-IL-36α” and “cy-IL-36α” refer to the IL-36α cytokine from humans and cynomolgus monkey, respectively.

[0070] “IL-36β” or “IL-36b” as used herein, refers to the interleukin-360 cytokine from any species in which it occurs. “hu-IL-36β” and “cy-IL-36β” refer to the IL-36β cytokine from humans and cynomolgus monkey, respectively.

[0071] “IL-36γ” or “IL-36g” as used herein, refers to the interleukin-367 cytokine from any species in which it occurs. “hu-IL-36γ” and “cy-IL-36γ” refer to the IL-36γ cytokine from humans and cynomolgus monkey, respectively.

[0072] “IL-36 mediated condition” or “IL-36 mediated disease,” as used herein, encompasses any medical condition associated with aberrant function of the signaling pathways mediated by binding of any of the IL-36 cytokines, IL-36α, IL-36β, and IL-36γ, to their cognate receptor IL-36R, including but not limited to, the downstream pathways known to be stimulated by the IL-36 cytokines that result in the production of cytokines, chemokines, enzymes, and adhesion molecules, including but not limited to IFN-γ, TNFα, IL-1α, IL-1β, IL-6, IL-8, IL-12, IL-23, CXCL1, CXCL8, and CCL20. For example, IL-36 mediated diseases can include, but are not limited to, diseases mediated by and/or responsive to antagonists or inhibitors of the IL-36 signaling pathways including inflammatory diseases, autoimmune diseases, and cancers. More specifically, IL-36 mediated diseases can include but are not limited to acne due to epidermal growth factor receptor inhibitors, acne and suppurative hidradenitis (PASH), acute generalized exanthematous pustulosis (AGEP), amicrobial pustulosis of the folds, amicrobial pustulosis of the scalp/leg, amicrobial subcorneal pustulosis, aseptic abscess syndrome, Behget's disease, bowel bypass syndrome, chronic obstructive pulmonary disease (COPD), childhood pustular dermatosis, Crohn's disease, deficiency of the interleukin-1 receptor antagonist (DIRA), deficiency of interleukin-36 receptor antagonist (DITRA), eczema, generalized pustular psoriasis (GPP), erythema elevatum diutinum, hidradenitis suppurativa, IgA pemphigus, inflammatory bowel disease (IBD), neutrophilic panniculitis, palmoplantar pustular psoriasis (PPP), psoriasis, psoriatic arthritis, pustular psoriasis (DIRA, DITRA), pyoderma gangrenosum, pyogenic arthritis pyoderma gangrenosum and acne (PAPA), pyogenic arthritis pyoderma gangrenosum acne and suppurative hidradenitis (PAPASH), rheumatoid neutrophilic dermatosis, synovitis acne pustulosis hyperostosis and osteitis (SAPHO), TNF-induced psoriasis form skin lesions in Crohn's patients, Sjogren's syndrome, Sweet's syndrome, systemic lupus erythematosus (SLE), ulcerative colitis, and uveitis.

[0073] “IL-36 stimulated signal,” as used herein, refers to an intracellular signal initiated by binding any of the IL-36 cytokines, IL-36α, IL-36β, or IL-36γ, to its cognate receptor, IL-36R. Exemplary IL-36 stimulated signals include the release of IL-8 from HaCat cells and/or primary human adult or neonatal keratinocyte (HEKn or HEKa) cells, as well as signals measured using surrogate cell-based blocking assays, such as a HEK-BLUE™ IL-36 responsive cell-based assay as disclosed in the Examples herein.

[0074] “Cell-based blocking assay” refers to an assay in which the ability of an antibody to inhibit or reduce the biological activity of the antigen it binds can be measured. For example, a cell-based blocking assay can be used to measure the concentration of antibody required to inhibit a specific biological or biochemical function, such as IL-36 cytokine mediated intracellular signaling. In some embodiments, the half maximal inhibitory concentration (IC₅₀) and/or 90% inhibitory concentration (IC₉₀) of an antibody (e.g., an anti-IL-36 antibody of the disclosure) is measured using a cell-based blocking assay. In some embodiments, the cell-based blocking assay is used to determine whether an antibody blocks the interaction between an agonist (e.g., IL-36α, IL-36β, IL-36γ) and its cognate receptor. Cell-based blocking assays useful with the antibodies of the present disclosure can include cell-line based assays (e.g., HaCat cells) or primary cell assays (e.g., primary human keratinocytes) as well as reporter or sensor cell assays (e.g., a HEK-BLUE™ reporter cell assay). Exemplary cell-based blocking assays for the IL-36 signaling pathways are described in the Examples provided herein.

[0075] “Antibody,” as used herein, refers to a molecule comprising one or more polypeptide chains that specifically binds to, or is immunologically reactive with, a particular antigen. Exemplary antibodies of the present disclosure include monoclonal antibodies, polyclonal antibodies, chimeric antibodies, humanized antibodies, human antibodies, multispecific (or heteroconjugate) antibodies (e.g., trispecific antibodies, bispecific antibodies, etc.), monovalent antibodies (e.g., single-arm antibodies), multivalent antibodies, antigen-binding fragments (e.g., Fab′, F(ab′)₂, Fab, Fv, rIgG, and scFv fragments), antibody fusions, and synthetic antibodies (or antibody mimetics). In a particularly preferred embodiment the antibody is a full length bispecific antibody.

[0076] “Anti-IL-36 antibody” or “antibody that binds IL-36” refers to an antibody that binds IL-36, including one or more of IL-36α, IL-36β, and IL-36γ, with sufficient affinity such that the antibody is useful as a diagnostic and/or therapeutic agent in targeting IL-36, i.e., one or more of IL-36α, IL-36β, and IL-36γ. In some embodiments, the extent of binding of an anti-IL-36 antibody to an unrelated, non-IL-36 antigen is less than about 10% of the binding of the antibody to IL-36 as measured, e.g., by a radioimmunoassay (RIA), by Surface plasmon resonance (SPR), or the like. In some embodiments, an antibody that binds to IL-36 has a dissociation constant (K_{D}) of <1 μM, <100 nM, <10 nM, <1 nM, <0.1 nM, <0.01 nM, or <1 μM (e.g., 10⁻⁸ M or less, e.g., from 10⁻⁸ M to 10⁻³ M, e.g., from 10⁻⁹ M to 10⁻¹³ M). In some embodiments, the antibody has such a dissociation constant for at least one of IL-36α, IL-36β, and IL-36γ. In one embodiment, the antibody is a multispecific antibody, preferably a bispecific antibody, where one of the antigen binding sites has such a dissociation constant for IL-36β and the other for IL-36α and/or IL-36γ and preferably for both of IL-36α and IL-36γ.

[0077] “Full-length antibody,” “intact antibody,” or “whole antibody” are used herein interchangeably to refer to an antibody having a structure substantially similar to a native antibody structure or having heavy chains that contain an Fc region as defined herein.

[0078] “Antibody fragment” refers to a portion of a full-length antibody which is capable of binding the same antigen as the full-length antibody. Examples of antibody fragments include, but are not limited to, Fv, Fab, Fab′, Fab′-SH, F(ab′)₂; diabodies; linear antibodies; monovalent, or single-armed antibodies; single-chain antibody molecules (e.g., scFv); and multispecific antibodies formed from antibody fragments.

[0079] “Class” of an antibody refers to the type of constant domain or constant region possessed by its heavy chain. There are five major classes of antibodies: IgA, IgD, IgE, IgG, and IgM, and several of these are further divided into subclasses (isotypes), e.g., IgG1, IgG2, IgG3, IgG4, IgA1, and IgA2. The heavy chain constant domains that correspond to the different classes of immunoglobulins are called α, δ, ε, γ, and μ respectively. A particularly preferred class of antibody is IgG.

[0080] “Variable region” or “variable domain” refers to the domain of an antibody heavy or light chain that is involved in binding the antibody to antigen. The variable domains of the heavy chain and light chain (V_{H} and V_{L}, respectively) of a native antibody generally have similar structures, with each domain comprising four conserved framework regions (FRs) and three hypervariable regions (HVRs) (see, e.g., Kindt et al., Kuby Immunology, 6^{th} ed., W. H. Freeman and Co., page 91). A single V_{H} or V_{L} domain may be sufficient to confer antigen-binding specificity. Furthermore, antibodies that bind a particular antigen may be isolated using a V_{H} or V_{L} domain from an antibody that binds the antigen to screen a library of complementary V_{L} or V_{H} domains, respectively (see, e.g., Portolano et al., J. Immunol. 150:880-887 (1993); Clarkson et al., Nature 352:624-628 (1991)).

[0081] “Hypervariable region” or “HVR,” as used herein, refers to each of the regions of an antibody variable domain which are hypervariable in sequence and/or form structurally defined loops (“hypervariable loops”). Generally, native antibodies comprise four chains with six HVRs; three in the heavy chain variable domain, V_{H} (HVR-H1, HVR-H2, HVR-H3), and three in the light chain variable domain, V_{L} (HVR-L1, HVR-L2, HVR-L3). The HVRs generally comprise amino acid residues from the hypervariable loops and/or from the “complementarity determining regions” (CDRs). A number of hypervariable region delineations are in use and are encompassed herein. The Kabat Complementarity Determining Regions (CDRs) are based on sequence variability and are the most commonly used (Kabat et al., Sequences of Proteins of Immunological Interest, 5th Ed. Public Health Service, National Institutes of Health, Bethesda, Md. (1991)). Chothia refers instead to the location of the structural loops (Chothia and Lesk J. Mol. Biol. 196:901-917 (1987)). The AbM hypervariable regions represent a compromise between the Kabat CDRs and Chothia structural loops and are used by Oxford Molecular's AbM antibody modeling software. The “contact” hypervariable regions are based on an analysis of the available complex crystal structures. The residues from each of these hypervariable regions are noted in the table below.

| Loop | Kabat | AbM | Chothia | Contact |
|---|---|---|---|---|
| L1 | L24-L34 | L24-L34 | L26-L32 | L30-L36 |
| L2 | L50-L56 | L50-L56 | L50-L52 | L46-L55 |
| L3 | L89-L97 | L89-L97 | L91-L96 | L89-L96 |
| H1 | H31-H35B¹ | H26-H35B¹ | H26-H32¹ | H30-H35B¹ |
| | H31-H35² | H26-H35² | H26-H32² | H30-H35² |
| H2 | H50-H65 | H50-H58 | H53-H55 | H47-H58 |
| H3 | H95-H102 | H95-H102 | H96-H101 | H93-H101 |

¹Kabat numbering
²Chothia numbering

[0082] Unless otherwise indicated, HVR residues and other residues in the variable domain (e.g., FR residues) are numbered herein according to Kabat et al., supra.

[0083] Hypervariable regions, as used herein, may include extended or alternative hypervariable regions as follows: 24-36 or 24-34 (L1), 46-56 or 50-56 (L2), and 89-97 or 89-96 (L3) in the V_{L} domain and 26-35, 30-35, 30-35A, 30-35B, or 31-35B (H1), 50-61, 50-65 or 49-65 (H2) and 93-102, 94-102, or 95-102 (H3) in the V_{H} domain. The variable domain residues are numbered according to Kabat et al., supra, for each of these definitions.

[0084] “Complementarity determining region,” or “CDR,” as used herein, refers to the regions within the HVRs of the variable domain which have the highest sequence variability and/or are involved in antigen recognition. Generally, native antibodies comprise four chains with six CDRs; three in the heavy chain variable domains, V_{H} (H1, H2, H3), and three in the light chain variable domains, V_{L} (L1, L2, L3). CDRs (CDR-L1, CDR-L2, CDR-L3, CDR-H1, CDR-H2, and CDR-H3) of exemplary anti-IL-36 antibodies of the present disclosure occur at amino acid residues 24-34 of L1, 50-56 of L2, 89-97 of L3, 30-35A of H1, 50-61 of H2, and 93-102 of H3 (numbering according to Kabat et al., supra). In one preferred embodiment, a HVR sequence referred to herein may correspond to a CDR.

[0085] “Framework” or “FR” refers to variable domain residues other than hypervariable region (HVR) residues. The FR of a variable domain generally consists of four FR domains: FR1, FR2, FR3, and FR4. Accordingly, the HVR and FR sequences generally appear in the following sequence in V_{H} (or V_{L}): FR1-H1(L1)-FR2-H2(L2)-FR3-H3(L3)-FR4.

[0086] “Native antibody” refers to a naturally occurring immunoglobulin molecule. For example, native IgG antibodies are heterotetrameric glycoproteins of about 150,000 Daltons, composed of two identical light chains and two identical heavy chains that are disulfide-bonded. From N- to C-terminus, each heavy chain has a variable region (V_{H}), also called a variable heavy domain or a heavy chain variable domain, followed by three constant domains (CH1, CH2, and CH3). Similarly, from N- to C-terminus, each light chain has a variable region (V_{L}), also called a variable light domain or a light chain variable domain, followed by a constant light (CL) domain. The light chain of an antibody may be assigned to one of two types, called kappa (κ) and lambda (λ), based on the amino acid sequence of its constant domain.

[0087] “Monoclonal antibody” as used herein refers to an antibody obtained from a substantially homogeneous population of antibodies, i.e., the individual antibodies comprising the population are identical and/or bind the same epitope, except for possible variant antibodies (e.g., variant antibodies contain mutations that occur naturally or arise during production of a monoclonal antibody, and generally are present in minor amounts). In contrast to polyclonal antibody preparations, which typically include different antibodies directed against different determinants (epitopes), each monoclonal antibody of a monoclonal antibody preparation is directed against a single determinant on an antigen. Thus, the term “monoclonal” indicates the character of the antibody as being obtained from a substantially homogeneous population of antibodies and is not to be construed as requiring production of the antibody by any particular method. For example, the monoclonal antibodies to be used may be made by a variety of techniques, including but not limited to the hybridoma method, recombinant DNA methods, phage-display methods, and methods utilizing transgenic animals containing all or part of the human immunoglobulin loci, such methods and other exemplary methods for making monoclonal antibodies being described herein.

[0088] “Chimeric antibody” refers to an antibody in which a portion of the heavy and/or light chain is derived from a particular source or species, while the remainder of the heavy and/or light chain is derived from a different source or species.

[0089] “Humanized antibody” refers to a chimeric antibody comprising amino acid sequences from non-human HVRs and amino acid sequences from human FRs. In certain embodiments, a humanized antibody will comprise substantially all of at least one, and typically two, variable domains, in which all or substantially all of the HVRs (e.g., CDRs) correspond to those of a non-human antibody, and all or substantially all of the FRs correspond to those of a human antibody. A humanized antibody optionally may comprise at least a portion of an antibody constant region derived from a human antibody. A “humanized form” of an antibody, e.g., a non-human antibody, refers to an antibody that has undergone humanization.

[0090] “Human antibody” refers to an antibody which possesses an amino acid sequence corresponding to that of an antibody produced by a human or a human cell or derived from a non-human source that utilizes human antibody repertoires or other human antibody-encoding sequences. This definition of a human antibody specifically excludes a humanized antibody comprising non-human antigen-binding residues.

[0091] “Human consensus framework” is a framework which represents the most commonly occurring amino acid residues in a selection of human immunoglobulin V_{L} or V_{H} framework sequences. Generally, the selection of human immunoglobulin V_{L} or V_{H} sequences is from a subgroup of variable domain sequences. Generally, the subgroup of sequences is a subgroup as in Kabat et al., Sequences of Proteins of Immunological Interest, Fifth Edition, NIH Publication 91-3242, Bethesda, Md. (1991), vols. 1-3. In one embodiment, for the V_{L}, the subgroup is subgroup kappa I as in Kabat et al., supra. In one embodiment, for the V_{H}, the subgroup is subgroup III as in Kabat et al., supra.

[0092] “Acceptor human framework” as used herein is a framework comprising the amino acid sequence of a light chain variable domain (V_{L}) framework or a heavy chain variable domain (V_{H}) framework derived from a human immunoglobulin framework or a human consensus framework. An acceptor human framework “derived from” a human immunoglobulin framework or a human consensus framework may comprise the same amino acid sequence thereof, or it may contain amino acid sequence changes. In some embodiments, the number of amino acid changes are 10 or less, 9 or less, 8 or less, 7 or less, 6 or less, 5 or less, 4 or less, 3 or less, or 2 or less. In some embodiments, the V_{L} acceptor human framework is identical in sequence to the V_{L} human immunoglobulin framework sequence or human consensus framework sequence.

[0093] “Fc region,” refers to a dimer complex comprising the C-terminal polypeptide sequences of an immunoglobulin heavy chain, wherein a C-terminal polypeptide sequence is that which is obtainable by papain digestion of an intact antibody. The Fc region may comprise native or variant Fc sequences. Although the boundaries of the Fc sequence of an immunoglobulin heavy chain may vary, the human IgG heavy chain Fc sequence is usually defined to stretch from an amino acid residue at about position Cys226, or from about position Pro230, to the carboxyl-terminus of the Fc sequence. However, the C-terminal lysine (Lys447) of the Fc sequence may or may not be present. The Fc sequence of an immunoglobulin generally comprises two constant domains, a CH2 domain and a CH3 domain, and optionally comprises a CH4 domain.

[0094] “Fc receptor” or “FcR,” refers to a receptor that binds to the Fc region of an antibody. In some embodiments, an FcR is a native human FcR. In some embodiments, an FcR is one which binds an IgG antibody (a gamma receptor) and includes receptors of the FcγRI, FcγRII, and FcγRIII subclasses, including allelic variants and alternatively spliced forms of those receptors. FcγRII receptors include FcγRIIA (an “activating receptor”) and FcγRIIB (an “inhibiting receptor”), which have similar amino acid sequences that differ primarily in the cytoplasmic domains thereof. Activating receptor FcγRIIA contains an immunoreceptor tyrosine-based activation motif (ITAM) in its cytoplasmic domain. Inhibiting receptor FcγRIIB contains an immunoreceptor tyrosine-based inhibition motif (ITIM) in its cytoplasmic domain, (see, e.g., Daeron, Annu. Rev. Immunol. 15:203-234 (1997)). FcR, as used herein, also includes the neonatal receptor, FcRn, which is responsible for the transfer of maternal IgGs to the fetus (Guyer et al, J. Immunol. 1 17:587 (1976) and Kim et al, J. Immunol. 24:249 (1994)) and regulation of homeostasis of immunoglobulins. FcRs are reviewed, for example, in Ravetch and Kinet, Annu. Rev. Immunol 9:457-92 (1991); Capel et al, Immunomethods 4:25-34 (1994); and de Haas et al, J. Lab. Clin. Med. 126:330-41 (1995).

[0095] “Multivalent antibody,” as used herein, is an antibody comprising three or more antigen binding sites. The multivalent antibody is preferably engineered to have the three or more antigen binding sites and is generally not a native sequence IgM or IgA antibody.

[0096] “Multispecific antibody” is an antibody having at least two different binding sites, each site with a different binding specificity. A multispecific antibody can be a full-length antibody or an antibody fragment, and the different binding sites may bind each to a different antigen or the different binding sites may bind to two different epitopes of the same antigen. A bispecific antibody has two binding sites, each with a different binding specificity and is a particularly preferred antibody of the invention.

[0097] “Fv fragment” refers to an antibody fragment which contains a complete antigen recognition and binding site. This region consists of a dimer of one heavy and one light chain variable domain in tight association, which can be covalent in nature, for example in scFv. It is in this configuration that the three HVRs of each variable domain interact to define an antigen binding site on the surface of the V_{H}-V_{L} dimer. Collectively, the six HVRs or a subset thereof confer antigen binding specificity to the antibody. However, even a single variable domain (or half of an Fv comprising only three HVRs specific for an antigen) has the ability to recognize and bind antigen, although usually at a lower affinity than the entire binding site.

[0098] “Fab fragment” refers to an antibody fragment that contains a variable and constant domain of the light chain and a variable domain and the first constant domain (CH1) of the heavy chain. “F(ab′)₂ fragments” comprise a pair of Fab fragments which are generally covalently linked near their carboxy termini by hinge cysteines between them. Other chemical couplings of antibody fragments also are known in the art.

[0099] “Antigen binding arm,” as used herein, refers to a component of an antibody that has an ability to specifically bind a target molecule of interest. Typically, the antigen binding arm is a complex of immunoglobulin polypeptide sequences, e.g., HVR and/or variable domain sequences of an immunoglobulin light and heavy chain.

[0100] “Single-chain Fv” or “scFv” refer to antibody fragments comprising the V_{H} and V_{L} domains of an antibody, wherein these domains are present in a single polypeptide chain. Generally, an Fv polypeptide further comprises a polypeptide linker between the V_{H} and V_{L}domains which enables the scFv to form the desired antigen binding structure.

[0101] “Diabodies” refers to small antibody fragments with two antigen-binding sites, which fragments comprise a heavy chain variable domain (V_{H}) connected to a light chain variable domain (V_{L}) in the same polypeptide chain (V_{H} and V_{L}). By using a linker that is too short to allow pairing between the two domains on the same chain, the domains are forced to pair with the complementary domains of another chain and create two antigen-binding sites.

[0102] “Linear antibodies” refers to the antibodies described in Zapata et al., Protein Eng., 8(10): 1057-1062 (1995). Briefly, these antibodies comprise a pair of tandem Fd regions (VH-CH1-VH-CH1) which, together with complementary light chain polypeptides, form a pair of antigen binding regions. Linear antibodies can be multispecific, such as e.g., trispecific or bispecific, or monospecific.

[0103] “Naked antibody” refers to an antibody that is not conjugated to a heterologous moiety (e.g., a cytotoxic moiety) or radiolabel.

[0104] “Affinity” refers to the strength of the total of noncovalent interactions between a single binding site of a molecule (e.g., an antibody) and its binding partner (e.g., an antigen). “Binding affinity” refers to intrinsic binding affinity which reflects a 1:1 interaction between members of a binding pair (e.g., antibody and antigen). The affinity of a molecule X for its partner Y can generally be represented by the equilibrium dissociation constant (K_{D}). Affinity can be measured by common methods known in the art, including those described herein. Specific illustrative and exemplary embodiments for measuring binding affinity are described in the following.

[0105] “Binds specifically” or “specific binding” refers to binding of an antibody to an antigen with an affinity value of no more than about 1×10⁻⁷ M. In one embodiment binds specifically may mean an antigen binding site binds IL-36β, but does not significantly bind IL-36α and IL-36γ. In another embodiment binds specifically may mean an antigen binding site binds IL-36α and/or IL-36γ, but does not significantly bind IL-36β.

[0106] “Affinity matured” antibody refers to an antibody with one or more alterations in one or more HVRs, compared to a parent antibody which does not possess such alterations, such alterations resulting in an improvement in the affinity of the antibody for antigen.

[0107] “Functional antigen binding site” of an antibody is one which is capable of binding a target antigen. The antigen binding affinity of the antigen binding site is not necessarily as strong as the parent antibody from which the antigen binding site is derived, but the ability to bind antigen must be measurable using any one of a variety of methods known for evaluating antibody binding to an antigen.

[0108] “Isolated antibody” refers to an antibody which has been separated from a component of its natural environment. In some embodiments, an antibody is purified to greater than 95% or 99% purity as determined by, for example, electrophoretic (e.g., SDS-PAGE, isoelectric focusing (IEF), capillary electrophoresis) or chromatographic methods (e.g., ion exchange or reverse phase HPLC). For review of methods for assessment of antibody purity, see, e.g., Flatman et al., J. Chromatogr. B 848:79-87.

[0109] “Substantially similar” or “substantially the same,” as used herein, refers to a sufficiently high degree of similarity between two numeric values (for example, one associated with a test antibody and the other associated with a reference antibody), such that one of skill in the art would consider the difference between the two values to be of little or no biological and/or statistical significance within the context of the biological characteristic measured by said values (e.g., K_{D} values).

[0110] “Substantially different,” as used herein, refers to a sufficiently high degree of difference between two numeric values (generally one associated with a molecule and the other associated with a reference molecule) such that one of skill in the art would consider the difference between the two values to be of statistical significance within the context of the biological characteristic measured by said values (e.g., K_{D} values).

[0111] As applied to polypeptides, the term “substantial similarity” or “substantially similar” typically means that two peptide sequences, when optimally aligned, such as by the programs GAP or BESTFIT using default gap weights, share at least 90% sequence identity, even more preferably at least 98% or 99% sequence identity. Preferably, residue positions, which are not identical differ by conservative amino acid substitutions. In cases where two or more amino acid sequences differ from each other by conservative substitutions, the percent sequence identity or degree of similarity may be adjusted upwards to correct for the conservative nature of the substitution. Means for making this adjustment are well-known to those of skill in the art. See, e.g., Pearson (1994) Methods Mol. Biol. 24: 307-331. Sequence similarity for polypeptides, which is also referred to as sequence identity, is typically measured using sequence analysis software. Protein analysis software matches similar sequences using measures of similarity assigned to various substitutions, deletions and other modifications, including conservative amino acid substitutions. For instance, GCG software contains programs such as Gap and Bestfit which can be used with default parameters to determine sequence homology or sequence identity between closely related polypeptides, such as homologous polypeptides from different species of organisms or between a wild type protein and a mutein thereof. See, e.g., GCG Version 6.1. Polypeptide sequences also can be compared using FASTA using default or recommended parameters, a program in GCG Version 6.1. FASTA (e.g., FASTA2 and FASTA3) provides alignments and percent sequence identity of the regions of the best overlap between the query and search sequences (Pearson (2000) supra). Another preferred algorithm when comparing a sequence of the disclosure to a database containing a large number of sequences from different organisms is the computer program BLAST, especially BLASTP or TBLASTN, using default parameters. See, e.g., Altschul et al. (1990) J. Mol. Biol. 215:403-410 and Altschul et al. (1997) Nucleic Acids Res. 25:3389-402.

[0112] A “conservative amino acid substitution” is one in which an amino acid residue is substituted by another amino acid residue having a side chain (R group) with similar chemical properties (e.g., charge or hydrophobicity). Typically, a conservative amino acid substitution will not substantially change the functional properties of a protein. Examples of groups of amino acids that have side chains with similar chemical properties include (1) aliphatic side chains: glycine, alanine, valine, leucine and isoleucine; (2) aliphatic-hydroxyl side chains: serine and threonine; (3) amide-containing side chains: asparagine and glutamine; (4) aromatic side chains: phenylalanine, tyrosine, and tryptophan; (5) basic side chains: lysine, arginine, and histidine; (6) acidic side chains: aspartate and glutamate, and (7) sulfur-containing side chains are cysteine and methionine. Preferred conservative amino acids substitution groups are: valine-leucine-isoleucine, phenylalanine-tyrosine, lysine-arginine, alanine-valine, glutamate-aspartate, and asparagine-glutamine. Alternatively, a conservative replacement is any change having a positive value in the PAM250 log-likelihood matrix disclosed in Gonnet et al. (1992) Science 256: 1443-1445. A “moderately conservative” replacement is any change having a nonnegative value in the PAM250 log-likelihood matrix.

[0113] The “Isoelectric point” of an antibody provided may be measured using any suitable technique. Programs such as ** ExPASY http://www.expasy.ch/tools/pi_tool.html, and http://www.iut-arles.up.univ-mrs.fr/w3bb/d_abim/compo-p.html, may be used, for instance, to predict the isoelectric point of the antibody or fragment.

[0114] “Effector functions” refer to those biological activities attributable to the Fc region of an antibody, which vary with the antibody isotype. Examples of antibody effector functions include: Clq binding and complement dependent cytotoxicity (CDC); Fc receptor binding; antibody-dependent cell-mediated cytotoxicity (ADCC); phagocytosis; down regulation of cell surface receptors (e.g., B cell receptor); and B cell activation.

[0115] “Immunoconjugate” refers to an antibody conjugated to one or more heterologous molecule(s), including but not limited to a cytotoxic agent.

[0116] “Treatment,” “treat” or “treating” refers to clinical intervention in an attempt to alter the natural course of a disorder in the individual being treated and can be performed either for prophylaxis or during the course of clinical pathology. Desired results of treatment can include, but are not limited to, preventing occurrence or recurrence of the disorder, alleviation of symptoms, diminishment of any direct or indirect pathological consequences of the disorder, preventing metastasis, decreasing the rate of progression, amelioration or palliation of a disease state, and remission or improved prognosis. For example, treatment can include administration of a therapeutically effective amount of pharmaceutical formulation comprising an anti-IL-36 antibody to a subject to delay development or slow progression of a disease or condition mediated by IL-36 or disease or condition in which IL-36, or a downstream pathways stimulated by an IL-36 cytokine, may play a role in the pathogenesis and/or progression.

[0117] “Pharmaceutical formulation” refers to a preparation in a form that allows the biological activity of the active ingredient(s) to be effective, and which contain no additional components which are toxic to the subjects to which the formulation is administered. A pharmaceutical formulation may include one or more active agents. For example, a pharmaceutical formulation may include an anti-IL-36 antibody as the sole active agent of the formulation or may include an anti-IL-36 antibody and one or more additional active agents.

[0118] By “sole active agent”, as used herein, is meant that the agent referred to is the only agent present in the formulation, or used in the therapy, that provides, or would be expected to provide, the relevant pharmacological effect to treat the subject for the condition, consistent with the description of “treatment” as provided herein. A pharmaceutical formulation comprising a sole active agent does not exclude the presence of one or more non-active agents, such as e.g., a pharmaceutically acceptable carrier, in the formulation. A “non-active agent” is an agent that would not be expected to provide, or otherwise significantly contribute to, the relevant pharmacological effect intended to treat the subject for the condition.

[0119] “Pharmaceutically acceptable carrier” refers to an ingredient in a pharmaceutical formulation, other than an active ingredient, which is nontoxic to the subject to whom it is administered. A pharmaceutically acceptable carrier includes, but is not limited to, a buffer, excipient, stabilizer, or preservative.

[0120] “Therapeutically effective amount” refers to the amount of an active ingredient or agent (e.g., a pharmaceutical formulation) to achieve a desired therapeutic or prophylactic result, e.g., to treat or prevent a disease, disorder, or condition in a subject. In the case of an IL-36 mediated disease or condition, the therapeutically effective amount of the therapeutic agent is an amount that reduces, prevents, inhibits, and/or relieves to some extent one or more of the symptoms associated with the disease, disorder, or condition. For treatment of inflammatory conditions, such as skin inflammatory conditions (e.g., eczema, psoriasis, rosacea, seborrheic dermatitis), efficacy in vivo can, for example, be measured by assessing the duration, severity, and/or recurrence of symptoms, the response rate (RR), duration of response, and/or quality of life.

[0121] “Concurrently,” as used herein, refers to administration of two or more therapeutic agents, where at least part of the administration overlaps in time. Accordingly, concurrent administration includes a dosing regimen when the administration of one or more agent(s) continues after discontinuing the administration of one or more other agent(s).

[0122] “Individual” or “subject” refers to a mammal, including but not limited to, domesticated animals (e.g., cows, sheep, cats, dogs, and horses), primates (e.g., humans and non-human primates such as monkeys), rabbits, and rodents (e.g., mice and rats).

### Detailed Description of Various Embodiments

### I. IL-36 Cytokines

[0123] Each of the agonist cytokines IL-36α, IL-36β, and IL-36γ induces intracellular signaling by binding to the cognate receptor, IL-36R (or IL1RL2). Binding by any of these IL-36 cytokines to the IL-36R receptor causes recruitment and engagement of co-receptor IL1RAP, resulting in the formation of a ternary signaling complex comprising IL-36R, IL1RAP, and the respective IL-36 cytokine that initiated the signaling event. Signal transduction stimulated by IL-36α, IL-36β, or IL-36γ leads to activation of the NK-κB transcription factor and AP-1 pathways in target cells and induces various inflammatory, proliferative, and pathogenic immune responses. See, e.g., Jennifer Towne et al., J. Biol. Chem. 279(14):13677-13688 (2004); Sebastian Gunther et al., J. Immunol. 193(2):921-930 (2014). In a preferred embodiment an antibody of the invention is able to trigger the formation of a ternary signaling complex comprising IL-36R, IL1RAP, and the respective IL-36 cytokine that initiated the signaling event. In another preferred embodiment an antibody of the invention is able to trigger signal transduction.

[0124] The IL-36 cytokines, IL-36α, IL-36β, and IL-36γ, are relatively short proteins that bind to and act as agonists of the receptor IL-36R. In vivo, the IL-36 cytokines undergo proteolytic processing that results in N-terminal truncation. This truncation is necessary for IL-36α, IL-36β, and IL-36γ to achieve their full agonist activity with IL-36R. Similarly, the IL-36R antagonist, IL-36Ra requires N-terminal truncation in order to achieve it full antagonist activity. The amino acid and nucleotide sequences and annotation of human versions of IL-36α, IL-36β, IL-36γ (also referred to herein as “hu-IL-36α,” “hu-IL-36β,” and “hu-IL-36γ”) and IL-36Ra are publicly available. See e.g, full amino acid sequences at UniProt entry numbers Q9UHA7, Q9NZH7-2, Q9NZH8, and Q9UBH0, respectively. Similarly, amino acid and nucleotide sequences of the versions of the three IL-36 cytokines from cynomolgus monkey, referred to herein as “cy-IL-36α,” “cy-IL-36β,” and “cy-IL-36γ,” also are publicly available at UniProt entry numbers A0A2K5UTG0, AOA2K5UV63-1, and AOA2K5VYV6.

[0125] Polypeptide constructs corresponding to portions of the hu-IL-36 and cy-IL-36 cytokine proteins can be used as antigens to elicit anti-IL-36 antibodies with binding affinity for the human and/or cynomolgus monkey versions of the specific IL-36 cytokines, IL-36α, IL-36β, and IL-36γ. As disclosed elsewhere herein, these anti-IL-36 antibodies are capable of partially or fully-blocking the binding of one or more of the specific cytokines IL-36α, IL-36β, and IL-36γ to its cognate receptor, and thereby decreasing intracellular signals initiated by this binding. Antibodies produced by immunization with IL-36 antigens may be modified, e.g., as described herein, to modulate (enhance or reduce) certain properties of the antibodies, including but not limited to e.g., enhancing affinity for the IL-36 antigen, enhancing affinity for another IL-36 antigen, enhancing cross-reactivity, reducing cross-reactivity, etc.

[0126] Table 1 below provides a summary description of the sequences of the human and cynomolgus monkey IL-36 polypeptide constructs used to generate anti-IL-36 antibodies of the present disclosure and their sequence identifiers. The UniProt database entry identifiers of the proteins are also included as well as the domain boundaries of the construct sequence relative to the full-length proteins. The sequences of each of the IL-36α, IL-36β, IL-36γ, or IL-36Ra polypeptide constructs correspond to the N-terminal truncated version having the highest agonist activity, or in the case of IL-36Ra, antagonist activity. For example, the N-terminal truncated IL-36α, IL-36β, and IL-36γ amino acid sequences provided in Table 1 begin at N-terminal positions K6, R5, and S18, respectively. Additionally, the purification tag sequences used to make easily purifiable versions of the IL-36 proteins as described elsewhere herein. The sequences also are included in the accompanying Sequence Listing.

TABLE 1
IL-36 SEQUENCES AND PURIFICATION TAGS

| | | | SEQ |
|---|---|---|---|
| | Domain | | ID |
| Description | Boundary | Sequence | NO: |
| hu-IL-36α | K6-F158 | KIDTPQQGSIQDINHRVWVLQDQTLIAVPRKDR | 1 |
| (UniProt | | MSPVTIALISCRHVETLEKDRGNPIYLGLNGLN | |
| Q9UHA7) | | LCLMCAKVGDQPTLQLKEKDIMDLYNQPEPV | |
| | | KSFLFYHSQSGRNSTFESVAFPGWFIAVSSEGG | |
| | | CPLILTQELGKANTTDFGLTMLF | |
| hu-IL-36β | R5-E157 | REAAPKSYAIRDSRQMVWVLSGNSLIAAPLSRS | 2 |
| (UniProt | | IKPVTLHLIACRDTEFSDKEKGNMVYLGIKGKD | |
| Q9NZH7-2) | | LCLFCAEIQGKPTLQLKEKNIMDLYVEKKAQK | |
| | | PFLFFHNKEGSTSVFQSVSYPGWFIATSTTSGQP | |
| | | IFLTKERGITNNTNFYLDSVE | |
| hu-IL-36γ | S18-D169 | SMCKPITGTINDLNQQVWTLQGQNLVAVPRSD | 3 |
| (UniProt | | SVTPVTVAVITCKYPEALEQGRGDPIYLGIQNP | |
| Q9NZH8) | | EMCLYCEKVGEQPTLQLKEQKIMDLYGQPEPV | |
| | | KPFLFYRAKTGRTSTLESVAFPDWFIASSKRDQ | |
| | | PIILTSELGKSYNTAFELNIND | |
| hu-IL-36Ra | V2-D155 | VLSGALCFRMKDSALKVLYLHNNQLLAGGLH | 4 |
| (UniProt | | AGKVIKGEEISVVPNRWLDASLSPVILGVQGGS | |
| Q9UBH0) | | QCLSCGVGQEPTLTLEPVNIMELYLGAKESKSF | |
| | | TFYRRDMGLTSSFESAAYPGWFLCTVPEADQP | |
| | | VRLTQLPENGGWNAPITDFYFQQCD | |
| cy-IL-36α | K6-F158 | KSEMPQPVSIQDINHRVWVLQDQILIAVPRKDR | 5 |
| (UniProt | | VSPVTISLISCRHVETLEKDRGNPIYLGLNGLNL | |
| A0A2K5UTG0) | | CLMCAKAGDQPTLQLKEKDIMDLYNQPEPVKS | |
| | | FLFYHSQSGRNSTFESVAFPGWFIAVSSEGGCP | |
| | | LILTQELGKANTTDFGLTMLF | |
| cy-IL-36β | W5-E157 | WQAAPKSYAIRDSRQMVWVLSGNSLIAAPLSN | 6 |
| (UniProt | | RVKPVTLHLITCRDTEFSDKKKGNLVYLGIRGK | |
| A0A2K5UV63-1) | | DLCLFCEEIQGKPTLQLKEKNIMDLYMEKKAQ | |
| | | KPFLFFHNKEGSSSVFQSVSYPGWFIATSSTSGQ | |
| | | PIFLTQERGITNNTNFYLDSVE | |
| cy-IL-36γ | S18-K168 | SMRTPITGTINDLNQQVWTLQGQILVAVPRSDS | 7 |
| (UniProt | | VTPVTVAVITCKYPEALDQSRGDPIYLGIRNPE | |
| A0A2K5VYV6) | | MCLCCEEVGGQPTLQLKEQKIMDLYGQPEPVK | |
| | | PFLFYRVKTGRTSTLESVAFPNWFIASSTRDQPI | |
| | | ILTSELGKSYNTAFELNIK | |
| 12xHis-SUMO | N/A | MHHHHHHHHHHHHMSDSEVNQEAKPEVKPE | 8 |
| | | VKPETHINLKVSDGSSEIFFKIKKTTPLRRLMEA | |
| | | FAKRQGKEMDSLRFLYDGIRIQADQTPEDLDM | |
| | | EDNDIIEAHREQIGG | |
| 12xHis-TEV | N/A | MHHHHHHHHHHHHENLYFQS | 9 |
| GS-AviTag | N/A | GGGGSGLNDIFEAQKIEWHE | 10 |
| signal | N/A | MGWSCIILFLVATATGVHS | 11 |
| sequence | | | |
| (mouse Ig | | | |
| heavy chain V | | | |
| region 102) | | | |
| GS-TEV-GS- | N/A | SGGGGSENLYFQGGGGSEPKSCDKTHTCPPCP | 12 |
| huIgG1Fc- | | APELLGGPSVFLFPPKPKDTLMISRTPEVTCVV | |
| FLAG | | VDVSHEDPEVKFNWYVDGVEVHNAKTKPREE | |
| | | QYNSTYRVVSVLTVLHQDWLNGKEYKCKVSN | |
| | | KALPAPIEKTISKAKGQPREPQVYTLPPSRDELT | |
| | | KNQVSLTCLVKGFYPSDIAVEWESNGQPENNY | |
| | | KTTPPVLDSDGSFFLYSKLTVDKSRWQQGNVF | |
| | | SCSVMHEALHNHYTQKSLSLSPGKDYKDDDD | |
| | | K | |

### II. Anti-IL-36 Antibodies

[0127] In some embodiments, the present disclosure provides structures of anti-IL-36 antibodies in terms of the amino acid and encoding nucleotide sequences of the various well-known immunoglobulin features (e.g., CDRs, HVRs, FRs, V_{H}, and V_{L} domains). Table 2A below provides a summary description of exemplary anti-L-36 antibody sequences of the present disclosure, and their sequence identifiers. These sequences and others are included in the accompanying Sequence Listing. Tables 21B and 2C respectively provide examples of preferred heavy chain sequences for heavy chains that form antigen binding sites that bind IL-36β (Table 2B) and preferred sequences for heavy chains that form antigen binding sites that bind IL-36α and/or IL-36γ (Table 2C). Table 2D sets out the two heavy chains and light chain that are present in particularly preferred antibodies of the invention. The sequences provided in Tables 2B to 2D are also included in the accompanying Sequence Listing with the Tables indicating the relevant SEQ ID Nos.

TABLE 2A
ANTI-IL-36 ANTIBODY SEQUENCES

| | | SEQ ID |
|---|---|---|
| Description | Sequence | NO: |
| mAb1.0-VL | QSVLTQPPSVSGAPGQRVTISC [symbol] WY | 13 |
| | QQLPGTAPKLLIY [symbol] GVPDRFSGSKSGTSASLAI | |
| | TGLQAEDEADYYCQ [symbol] FGGGTKLTVL | |
| mAb1.0-HVR- | TGSSSNIGAHYDVH | 14 |
| L1 | | |
| mAb1.0-HVR- | SNNNRPS | 15 |
| L2 | | |
| mAb1.0-HVR- | QSYDYSLRGYV | 16 |
| L3 | | |
| mAb2.0-VL and | QSVLTQPPSVSGAPGQRVTISC [symbol] WY | 17 |
| mAb6.0_2.0- | QQLPGTAPKLLIY [symbol] GVPDRFSGSKSGTSASLAI | |
| VL | TGLQAEDEADYYC [symbol] FGGGTKLTVL | |
| mAb2, mAb6_2, | ESVLTQPPSVSGAPGQRVTISC [symbol] WY | 77 |
| mAb6_2.7, and | QQLPGTAPKLLIY [symbol] GVPDRFSGSKSGTSASLAI | |
| mAb2.10-VL | TGLQAEDEADYYC [symbol] FGGGTKLTVL | |
| mAb2.0, mAb2, | TGSSSNIGAHYDVH | 18 |
| mAb6_2, | | |
| mAb6_2.7, and | | |
| mAb2.10-HVR- | | |
| L1 | | |
| mAb2.0, mAb2, | GNDNRPS | 19 |
| mAb6_2, | | |
| mAb6_2.7, and | | |
| mAb2.10-HVR- | | |
| L2 | | |
| mAb2.0, mAb2, | QSYDYSLSGYV | 20 |
| mAb6_2, | | |
| mAb6_2.7, and | | |
| mAb2.10-HVR- | | |
| L3 | | |
| mAb3.0-VL | QSVLTQPPSVSGAPGQRVTISC [symbol] WY | 21 |
| | QQLPGTAPKLLIY [symbol] GVPDRFSGSKSGTSASLAI | |
| | TGLQAEDEADYYC [symbol] FGGGTKLTVL | |
| mAb3.0-HVR- | TGSSSNIGAGYDVH | 22 |
| L1 | | |
| mAb3.0-HVR- | GNTNRPS | 23 |
| L2 | | |
| mAb3.0-HVR- | QSYDYSLRGYV | 24 |
| L3 | | |
| mAb4.0-VL | QSVLTQPPSVSGAPGQRVTISC [symbol] WY | 25 |
| | QQLPGTAPKLLIY [symbol] GVPDRFSGSKSGTSASLAI | |
| | TGLQAEDEADYYC [symbol] FGGGTKLTVL | |
| mAb4.0-HVR- | TGSSSNIGAGYDVH | 26 |
| L1 | | |
| mAb4.0-HVR- | GNRNRPS | 27 |
| L2 | | |
| mAb4.0-HVR- | QSYDYSLRVYV | 28 |
| L3 | | |
| mAb5.0-VL | QSVLTQPPSVSGAPGQRVTISC [symbol] WY | 29 |
| | QQLPGTAPKLLIY [symbol] GVPDRFSGSKSGTSASLAI | |
| | TGLQAEDEADYYC [symbol] FGGGTKLTVL | |
| mAb5.0-HVR- | TGSSSNIGAGYDVH | 30 |
| L1 | | |
| mAb5.0-HVR- | GNDNRPS | 31 |
| L2 | | |
| mAb5.0-HVR- | QSYDYSLKAYV | 32 |
| L3 | | |
| mAb6.0-VL | QSVLTQPPSVSGAPGQRVTISC [symbol] WY | 33 |
| | QQLPGTAPKLLIY [symbol] GVPDRFSGSKSGTSASLAI | |
| | TGLQAEDEADYYC [symbol] FGGGTKLTVL | |
| mAb6-VL | ESVLTQPPSVSGAPGQRVTISC [symbol] Y | 78 |
| | QQLPGTAPKLLIY [symbol] GVPDRFSGSKSGTSASLAI | |
| | TGLQAEDEADYYC [symbol] FGGGTKLTVL | |
| mAb6.0 and | TGSSSNIGAGYDVH | 34 |
| mAb6-HVR-L1 | | |
| mAb6.0 and | GNTNRPS | 35 |
| mAb6-HVR-L2 | | |
| mAb6.0 and | QSYDISLSGWV | 36 |
| mAb6-HVR-L3 | | |
| mAb7.0-VL | EIVLTQSPGTLSLSPGERATLSC [symbol] WYQQ | 37 |
| | KPGQAPKLLIY [symbol] GVPSRFSGSGSGTDFTLTISSL | |
| | QPEDFATYYC [symbol] FGQGTKVEIK | |
| mAb7.0-HVR- | RASQSVSSNYLA | 38 |
| L1 | | |
| mAb7.0-HVR- | SASSLQS | 39 |
| L2 | | |
| mAb7.0-HVR- | QQTYSYPPT | 40 |
| L3 | | |
| mAb8.0-VL | DIQMTQSPSSLSASVGDRVTITC [symbol] WYQQ | 41 |
| | KPGKAPKLLIY [symbol] GVPSRFSGSGSGTDFTLTISSL | |
| | QPEDFATYYC [symbol] FGQGTKVEIK | |
| mAb8.0-HVR- | RASQTIYKYLN | 42 |
| L1 | | |
| mAb8.0-HVR- | AASSLQS | 43 |
| L2 | | |
| mAb8.0-HVR- | QQYSSIPYT | 44 |
| L3 | | |
| mAb1.0-VH | QVQLVESGGGVVQPGRSLRLSCAASGFSF [symbol] V | 45 |
| | RQAPGKGLEWVA [symbol] SVKGRFTISRDNS | |
| | KNTLYLQMNSLRAEDTAVYYC [symbol] WGQ | |
| | GTLVTVSS | |
| mAb1.0-HVR- | SAYAMHW | 46 |
| H1 | | |
| mAb1.0-HVR- | VISYDGTNEYYAD | 47 |
| H2 | | |
| mAb1.0-HVR- | ARGIRIFTSYFDS | 48 |
| H3 | | |
| mAb2.0-VH | QLQLQESGPGLVKPSETLSLTCTVSGGSI [symbol] GWI | 49 |
| | RQPPGKGLEWIG [symbol] SLKSRVTISVDTSKN | |
| | QFSLKLSSVTAADTAVYYC [symbol] WGQ | |
| | GTLVTVSS | |
| mAb2-VH | ELQLQESGPGLVKPSETLSLTCTVSGGSI [symbol] GWI | 79 |
| | RQPPGKGLEWIG [symbol] SLKSRVTISVDTSKN | |
| | QFSLKLSSVTAADTAVYYC [symbol] WGQ | |
| | GTLVTVSS | |
| mAb2.0 and | STSSYYW | 50 |
| mAb2-HVR-H1 | | |
| mAb2.0 and | SIYYTGNTYYNP | 51 |
| mAb2-HVR-H2 | | |
| mAb2.0 and | ARVRYGVGVPRYFDP | 52 |
| mAb2-HVR-H3 | | |
| mAb3.0-VH | QLQLQESGPGLVKPSETLSLTCTVSGGSI [symbol] GWI | 53 |
| | RQPPGKGLEWIG [symbol] SLKSRVTISVDTSKN | |
| | QFSLKLSSVTAADTAVYYC [symbol] WGQ | |
| | GTLVTVSS | |
| mAb3.0-HVR- | SSTSYYW | 54 |
| H1 | | |
| mAb3.0-HVR- | SIHYSGNTYYNP | 55 |
| H2 | | |
| mAb3.0-HVR- | ARVHYGGYIPRRFDH | 56 |
| H3 | | |
| mAb4.0-VH | QLQLQESGPGLVKPSETLSLTCTVSGGSI [symbol] GWI | 57 |
| | RQPPGKGLEWIG [symbol] SLKSRVTISVDTSKN | |
| | QFSLKLSSVTAADTAVYYC [symbol] WGQGT | |
| | LVTVSS | |
| mAb4.0-HVR- | GSRSYYW | 58 |
| H1 | | |
| mAb4.0-HVR- | SIHYSGTTYYNP | 59 |
| H2 | | |
| mAb4.0-HVR- | ARVAPSYPRVFDY | 60 |
| H3 | | |
| mAb5.0-VH | EVQLLESGGGLVQPGGSLRLSCAASGFTF [symbol] WV | 61 |
| | RQAPGKGLEWVS [symbol] SVKGRFTISRDNS | |
| | KNTLYLQMNSLRAEDTAVYYC [symbol] | |
| | WGQGTLVTVSS | |
| mAb5.0-HVR- | STYAMS | 62 |
| H1 | | |
| mAb5.0-HVR- | GISGGSGYTYYAD | 63 |
| H2 | | |
| mAb5.0-HVR- | ARVVTYRDPPASFDY | 64 |
| H3 | | |
| mAb6.0 and | QLQLQESGPGLVKPSETLSLTCTVSGGSI [symbol] GWI | 65 |
| mAb6.0_2.0- | RQPPGKGLEWIG [symbol] SLKSRVTISVDTSKN | |
| VH | QFSLKLSSVTAADTAVYYC [symbol] WGQG | |
| | TLVTVSS | |
| mAb6 and | ELQLQESGPGLVKPSETLSLTCTVSGGSI [symbol] GWI | 80 |
| mAb6_2-VH | RQPPGKGLEWIG [symbol] SLKSRVTISVDTSKN | |
| | QFSLKLSSVTAADTAVYYC [symbol] WGQG | |
| | TLVTVSS | |
| mAb6.0 and | TSSNYYW | 66 |
| mAb6 and | | |
| mAb6.0_2.0 and | | |
| mAb6_2-HVR- | | |
| H1 | | |
| mAb6.0 and | SIDYTGSTYYNP | 67 |
| mAb6 and | | |
| mAb6.0_2.0 and | | |
| mAb6_2-HVR- | | |
| H2 | | |
| mAb6.0 and | ARGKYYETYLGFDV | 68 |
| mAb6 and | | |
| mAb6.0_2.0 and | | |
| mAb6_2-HVR- | | |
| H3 | | |
| mAb7.0-VH | QVQLVESGGGVVQPGRSLRLSCAASGFTF [symbol] WV | 69 |
| | RQAPGKGLEWVA [symbol] SVKGRFTISRDNS | |
| | KNTLYLQMNSLRAEDTAVYYC [symbol] | |
| | [symbol] WGQGTLVTVSS | |
| mAb7.0-HVR- | SSYGMH | 70 |
| H1 | | |
| mAb7.0-HVR- | VISYGGSERYYAD | 71 |
| H2 | | |
| mAb7.0-HVR- | AREPWYSSRGWTGYGFDV | 72 |
| H3 | | |
| mAb8.0-VH | QVQLVQSGAEVKKPGSSVKVSCKASGGTF [symbol] WV | 73 |
| | RQAPGQGLEWMG [symbol] KFQGRVTITADE | |
| | STSTAYMELSSLRSEDTAVYYC [symbol] WG | |
| | QGTLVTVSS | |
| mAb8.0-HVR- | SNYAIS | 74 |
| H1 | | |
| mAb8.0-HVR- | GILPILGTVDYAQ | 75 |
| H2 | | |
| mAb8.0-HVR- | AREPWYRLGAFDV | 76 |
| H3 | | |
| mAb6_2.1-VH | ELQLQESGPGLVKPSETLSLTCTVSGGSI [symbol] GWI | 81 |
| | RQPPGKGLEWIG [symbol] SLKSRVTISVDTSKN | |
| | QFSLKLSSVTAADTAVYYC [symbol] WGQG | |
| | TLVTVSS | |
| mAb6_2.1- | TSTNYYW | 82 |
| HVR-H1 | | |
| mAb6_2.1- | NIDYTGSTYYNA | 83 |
| HVR-H2 | | |
| mAb6_2.1- | ATGKYYETYLGFDV | 84 |
| HVR-H3 | | |
| mAb6_2.2-VH | ELQLQESGPGLVKPSETLSLTCTVSGGSI [symbol] GWI | 85 |
| | RQPPGKGLEWIG [symbol] SLKSRVTISVDTSKN | |
| | QFSLKLSSVTAADTAVYYC [symbol] WGQ | |
| | GTLVTVSS | |
| mAb6_2.2- | TSSNAYW | 86 |
| HVR-H1 | | |
| mAb6_2.2- | SIDYTGSTAYNP | 87 |
| HVR-H2 | | |
| mAb6_2.2- | AHGKYYETYLGFDV | 88 |
| HVR-H3 | | |
| mAb6_2.3-VH | ELQLQESGPGLVKPSETLSLTCTVSGGSI [symbol] GWI | 89 |
| | RQPPGKGLEWIG [symbol] SLKSRVTISVDTSKN | |
| | QFSLKLSSVTAADTAVYYC [symbol] WGQG | |
| | TLVTVSS | |
| mAb6_2.3- | TASNYYW | 90 |
| HVR-H1 | | |
| mAb6_2.3- | SIDYTGSTYYNT | 91 |
| HVR-H2 | | |
| mAb6_2.3- | ATGKYYETYLGFDV | 92 |
| HVR-H3 | | |
| mAb6_2.4-VH | ELQLQESGPGLVKPSETLSLTCTVSGGSI [symbol] GWI | 93 |
| | RQPPGKGLEWIG [symbol] SLKSRVTISVDTSKN | |
| | QFSLKLSSVTAADTAVYYC [symbol] WGQG | |
| | TLVTVSS | |
| mAb6_2.4- | TASNYYW | 94 |
| HVR-H1 | | |
| mAb6_2.4- | SIDYTGSTYYNP | 95 |
| HVR-H2 | | |
| mAb6_2.4- | ATGKYYETYLGFDV | 96 |
| HVR-H3 | | |
| mAb6_2.5-VH | ELQLQESGPGLVKPSETLSLTCTVSGGSI [symbol] GWI | 97 |
| | RQPPGKGLEWIG [symbol] SLKSRVTISVDTSKN | |
| | QFSLKLSSVTAADTAVYYC [symbol] WGQG | |
| | TLVTVSS | |
| mAb6_2.5- | TASNYYW | 98 |
| HVR-H1 | | |
| mAb6_2.5- | SIDYTGSTYYEP | 99 |
| HVR-H2 | | |
| mAb6_2.5- | ATGSYYETYLGFDV | 100 |
| HVR-H3 | | |
| mAb6_2.6-VH | ELQLQESGPGLVKPSETLSLTCTVSGGSI [symbol] GWI | 101 |
| | RQPPGKGLEWIG [symbol] SLKSRVTISVDTSKN | |
| | QFSLKLSSVTAADTAVYYC [symbol] WGQG | |
| | TLVTVSS | |
| mAb6_2.6- | TASNYYW | 102 |
| HVR-H1 | | |
| mAb6_2.6- | SIDYTGSTYYEP | 103 |
| HVR-H2 | | |
| mAb6_2.6- | ATGNYYETYLGFDV | 104 |
| HVR-H3 | | |
| mAb6_2.7-VH | ELQLQESGPGLVKPSETLSLTCTVSGGSI [symbol] GWI | 105 |
| | RQPPGKGLEWIG [symbol] SLKSRVTISVDTSKN | |
| | QFSLKLSSVTAADTAVYYC [symbol] WGQG | |
| | TLVTVSS | |
| mAb6_2.7- | TASNTYW | 106 |
| HVR-H1 | | |
| mAb6_2.7- | SIDYTGSTYYNP | 107 |
| HVR-H2 | | |
| mAb6_2.7- | ATGKYYETYLGFDV | 108 |
| HVR-H3 | | |
| mAb6_2.8-VH | ELQLQESGPGLVKPSETLSLTCTVSGGSI [symbol] GWI | 109 |
| | RQPPGKGLEWIG [symbol] SLKSRVTISVDTSKN | |
| | QFSLKLSSVTAADTAVYYC [symbol] WGQG | |
| | TLVTVSS | |
| mAb6_2.8- | TASNYYW | 110 |
| HVR-H1 | | |
| mAb6_2.8- | SIDYTGSTYYNP | 111 |
| HVR-H2 | | |
| mAb6_2.8- | ASGKYYETYLGFDV | 112 |
| HVR-H3 | | |
| mAb6_2.9-VH | ELQLQESGPGLVKPSETLSLTCTVSGGSI [symbol] GWI | 113 |
| | RQPPGKGLEWIG [symbol] SLKSRVTISVDTSKN | |
| | QFSLKLSSVTAADTAVYYC [symbol] WGQG | |
| | TLVTVSS | |
| mAb6_2.9- | TSSNYYW | 114 |
| HVR-H1 | | |
| mAb6_2.9- | SIDYTGSTYYNP | 115 |
| HVR-H2 | | |
| mAb6_2.9- | ATGKYYETYLGFDV | 116 |
| HVR-H3 | | |
| mAb6_2.10-VH | ELQLQESGPGLVKPSETLSLTCTVSGGSI [symbol] GWI | 117 |
| | RQPPGKGLEWIG [symbol] SLKSRVTISVDTSKN | |
| | QFSLKLSSVTAADTAVYYC [symbol] WGQ | |
| | GTLVTVSS | |
| mAb6_2.10- | TSSNYYW | 118 |
| HVR-H1 | | |
| mAb6_2.10- | SIDYTGSTYYQP | 119 |
| HVR-H2 | | |
| mAb6_2.10- | ARGNYYETYLGFDV | 120 |
| HVR-H3 | | |
| mAb2.1-VH | ELQLQESGPGLVKPSETLSLTCTVSGGSI [symbol] GWI | 121 |
| | RQPPGKGLEWIG [symbol] SLKSRVTISVDTSKN | |
| | QFSLKLSSVTAADTAVYYC [symbol] WGQ | |
| | GTLVTVSS | |
| mAb2.1-HVR- | SDSSYYW | 122 |
| H1 | | |
| mAb2.1-HVR- | SIYYTGNTYYNS | 123 |
| H2 | | |
| mAb2.1-HVR- | ARVRYGVGVPRYFDP | 124 |
| H3 | | |
| mAb2.2-VH | ELQLQESGPGLVKPSETLSLTCTVSGGSI [symbol] GWI | 125 |
| | RQPPGKGLEWIG [symbol] SLKSRVTISVDTSKN | |
| | QFSLKLSSVTAADTAVYYC [symbol] WG | |
| | QGTLVTVSS | |
| mAb2.2-HVR- | SESSYYW | 126 |
| H1 | | |
| mAb2.2-HVR- | SIYYTGNTYYNP | 127 |
| H2 | | |
| mAb2.2-HVR- | AGVRYGVGVPRYFDP | 128 |
| H3 | | |
| mAb2.3-VH | ELQLQESGPGLVKPSETLSLTCTVSGGSI [symbol] GWI | 129 |
| | RQPPGKGLEWIG [symbol] SLKSRVTISVDTSKN | |
| | QFSLKLSSVTAADTAVYYC [symbol] WGQ | |
| | GTLVTVSS | |
| mAb2.3-HVR- | STSSDYW | 130 |
| H1 | | |
| mAb2.3-HVR- | SIYYTGNTYYLP | 131 |
| H2 | | |
| mAb2.3-HVR- | SRVRYGVGVPRYFDP | 132 |
| H3 | | |
| mAb2.4-VH | ELQLQESGPGLVKPSETLSLTCTVSGGSIS [symbol] GWI | 133 |
| | RQPPGKGLEWIG [symbol] SLKSRVTISVDTSKN | |
| | QFSLKLSSVTAADTAVYYC [symbol] WGQ | |
| | GTLVTVSS | |
| mAb2.4-HVR- | SNSSYYW | 134 |
| H1 | | |
| mAb2.4-HVR- | SIYYTGNTYYLP | 135 |
| H2 | | |
| mAb2.4-HVR- | ARVRYGVGVPRYFDP | 136 |
| H3 | | |
| mAb2.5-VH | ELQLQESGPGLVKPSETLSLTCTVSGGSI [symbol] GWI | 137 |
| | RQPPGKGLEWIG [symbol] SLKSRVTISVDTSKN | |
| | QFSLKLSSVTAADTAVYYC [symbol] WGQ | |
| | GTLVTVSS | |
| mAb2.5-HVR- | SESSYYW | 138 |
| H1 | | |
| mAb2.5-HVR- | SIYYTGNTYYLP | 139 |
| H2 | | |
| mAb2.5-HVR- | ARVRYGVGVPRYFDP | 140 |
| H3 | | |
| mAb2.6-VH | ELQLQESGPGLVKPSETLSLTCTVSGGSI [symbol] GWI | 141 |
| | RQPPGKGLEWIG [symbol] SLKSRVTISVDTSKN | |
| | QFSLKLSSVTAADTAVYYC [symbol] WGQ | |
| | GTLVTVSS | |
| mAb2.6-HVR- | STSSYHW | 142 |
| H1 | | |
| mAb2.6-HVR- | SIYYTGNTYYMP | 143 |
| H2 | | |
| mAb2.6-HVR- | VRVRYGVGVPRYFDP | 144 |
| H3 | | |
| mAb2.7-VH | ELQLQESGPGLVKPSETLSLTCTVSGGSI [symbol] GWI | 145 |
| | RQPPGKGLEWIG [symbol] SLKSRVTISVDTSKN | |
| | QFSLKLSSVTAADTAVYYC [symbol] WGQ | |
| | GTLVTVSS | |
| mAb2.7-HVR- | SRSSYYW | 146 |
| H1 | | |
| mAb2.7-HVR- | SIYYTGNTYYWP | 147 |
| H2 | | |
| mAb2.7-HVR- | TRVRYGVGVPRYFDP | 148 |
| H3 | | |
| mAb2.8-VH | ELQLQESGPGLVKPSETLSLTCTVSGGSI [symbol] GWI | 149 |
| | RQPPGKGLEWIG [symbol] SLKSRVTISVDTSKN | |
| | QFSLKLSSVTAADTANYYC [symbol] WGQ | |
| | GTLVTVSS | |
| mAb2.8-HVR- | SDSSYYW | 150 |
| H1 | | |
| mAb2.8-HVR- | SIYYTGETYYAP | 151 |
| H2 | | |
| mAb2.8-HVR- | ARLRYGVGVPRYFDP | 152 |
| H3 | | |
| mAb2.9-VH | ELQLQESGPGLVKPSETLSLTCTVSGGSI [symbol] GWI | 153 |
| | RQPPGKGLEWIG [symbol] SLKSRVTISVDTSKN | |
| | QFSLKLSSVTAADTAVYYC [symbol] WGQ | |
| | GTLVTVSS | |
| mAb2.9-HVR- | SDSSYYW | 154 |
| H1 | | |
| mAb2.9-HVR- | SIYYTGETYYAP | 155 |
| H2 | | |
| mAb2.9-HVR- | ARVKYGVGVPRYFDP | 156 |
| H3 | | |
| mAb2.10-VH | ELQLQESGPGLVKPSETLSLTCTVSGGSI [symbol] GWI | 157 |
| | RQPPGKGLEWIG [symbol] SLKSRVTISVDTSKN | |
| | QFSLKLSSVTAADTAVYYC [symbol] WG | |
| | QGTLVTVSS | |
| mAb2.10-HVR- | SDSSYYW | 158 |
| H1 | | |
| mAb2.10-HVR- | SIYYTGETYYAP | 159 |
| H2 | | |
| mAb2.10-HVR- | ARVRYGVGVPRHFDP | 160 |
| H3 | | |
| mAb2.11-VH | ELQLQESGPGLVKPSETLSLTCTVSGGSI [symbol] GWI | 161 |
| | RQPPGKGLEWIG [symbol] SLKSRVTISVDTSKN | |
| | QFSLKLSSVTAADTAVYYC [symbol] WGQ | |
| | GTLVTVSS | |
| mAb2.11-HVR- | SESSYYW | 162 |
| H1 | | |
| mAb2.11-HVR- | SIYYTGETYYAP | 163 |
| H2 | | |
| mAb2.11-HVR- | ARLRYGVGVPRYFDP | 164 |
| H3 | | |
| mAb2.12-VH | ELQLQESGPGLVKPSETLSLTCTVSGGSI [symbol] GWI | 165 |
| | RQPPGKGLEWIG [symbol] SLKSRVTISVDTSKN | |
| | QFSLKLSSVTAADTAVYYC [symbol] WGQ | |
| | GTLVTVSS | |
| mAb2.12-HVR- | SESSYYW | 166 |
| H1 | | |
| mAb2.12-HVR- | SIYYTGETYYAP | 167 |
| H2 | | |
| mAb2.12-HVR- | ARVKYGVGVPRYFDP | 168 |
| H3 | | |
| mAb2, mAb6_2, | ESVLTQPPSVSGAPGQRVTISC [symbol] VHWY | 169 |
| and mAb6_2.7 | QQLPGTAPKLLIY [symbol] GVPDRFSGSKSGTSASLAI | |
| and mAb2.10- | TGLQAEDEADYYC [symbol] VFGGGTKLTVLGQP | |
| LC | KAAPSVTLFPPSSEELQANKATLVCLISDFYPGAVTVA | |
| | WKADSSPVKAGVETTTPSKQSNNKYAASSYLSLTPEQ | |
| | WKSHKSYSCQVTHEGSTVEKTVAPTECS | |
| mAb6-LC | ESVLTQPPSVSGAPGQRVTISC [symbol] WY | 242 |
| | QQLPGTAPKLLIY [symbol] GVPDRFSGSKSGTSASLAI | |
| | TGLQAEDEADYYC [symbol] FGGGTKLTVLGQP | |
| | KAAPSVTLFPPSSEELQANKATLVCLISDFYPGAVTVA | |
| | WKADSSPVKAGVETTTPSKQSNNKYAASSYLSLTPEQ | |
| | WKSHKSYSCQVTHEGSTVEKTVAPTECS | |
| mAb6.0-LC | QESVLTQPPSVSGAPGQRVTISC [symbol] W | 247 |
| | YQQLPGTAPKLLIY [symbol] GVPDRFSGSKSGTSASL | |
| | AITGLQAEDEADYYC [symbol] FGGGTKLTVLG | |
| | QPKAAPSVTLFPPSSEELQANKATLVCLISDFYPGAVTV | |
| | AWKADSSPVKAGVETTTPSKQSNNKYAASSYLSLTPE | |
| | QWKSHKSYSCQVTHEGSTVEKTVAPTECS | |
| mAb6.0 and | QLQLQESGPGLVKPSETLSLTCTVSGGSI [symbol] GWI | 248 |
| mAb6.0_2.0-HC | RQPPGKGLEWIG [symbol] SLKSRVTISVDTSKN | |
| | QFSLKLSSVTAADTAVYYC [symbol] WGQG | |
| | TLVTVSSASTKGPSVFPLAPSSKSTSGGTAALGCLVKD | |
| | YFPEPVTVSWNSGALTSGVHTFPAVLQSSGLYSLSSVV | |
| | TVPSSSLGTQTYICNVNHKPSNTKVDKKVEPKSCDKTH | |
| | TCPPCPAPELLGGPSVFLFPPKPKDTLMISRTPEVTCVV | |
| | VDVSHEDPEVKFNWYVDGVEVHNAKTKPREEQYGST | |
| | YRVVSVLTVLHQDWLNGKEYKCKVSNKALPAPIEKTI | |
| | SKAKGQPREPQVYTLPPSRDELTKNQVSLTCLVKGFYP | |
| | SDIAVEWESNGQPENNYKTTPPVLDSDGSFFLYSKLTV | |
| | DKSRWQQGNVFSCSVMHEALHNHYTQKSLSLSPG | |
| mAb6.0 and | QLQLQESGPGLVKPSETLSLTCTVSGGSI [symbol] GWI | 249 |
| mAb6.0_2.0-HC | RQPPGKGLEWIG [symbol] SLKSRVTISVDTSKN | |
| (knob) | QFSLKLSSVTAADTAVYYC [symbol] WGQG | |
| | TLVTVSSASTKGPSVFPLAPSSKSTSGGTAALGCLVKD | |
| | YFPEPVTVSWNSGALTSGVHTFPAVLQSSGLYSLSSVV | |
| | TVPSSSLGTQTYICNVNHKPSNTKVDKKVEPKSCDKTH | |
| | TCPPCPAPELLGGPSVFLFPPKPKDTLMISRTPEVTCVV | |
| | VDVSHEDPEVKFNWYVDGVEVHNAKTKPREEQYGST | |
| | YRVVSVLTVLHQDWLNGKEYKCKVSNKALPAPIEKTI | |
| | SKAKGQPREPQVYTLPPSRDELTKNQVSLWCLVKGFY | |
| | PSDIAVEWESNGQPENNYKTTPPVLDSDGSFFLYSKLT | |
| | VDKSRWQQGNVFSCSVMHEALHNHYTQKSLSLSPG | |
| mAb6.0 and | QLQLQESGPGLVKPSETLSLTCTVSGGSI [symbol] GWI | 250 |
| mAb6.0_2.0-HC | RQPPGKGLEWIG [symbol] SLKSRVTISVDTSKN | |
| (hole) | QFSLKLSSNYAADYANAAC [symbol] WGQG | |
| | TLVTVSSASTKGPSVFPLAPSSKSTSGGTAALGCLVKD | |
| | YFPEPVTVSWNSGALTSGVHTFPAVLQSSGLYSLSSVV | |
| | TVPSSSLGTQTYICNVNHKPSNTKVDKKVEPKSCDKTH | |
| | TCPPCPAPELLGGPSVFLFPPKPKDTLMISRTPEVTCVV | |
| | VDVSHEDPEVKFNWYVDGVEVHNAKTKPREEQYGST | |
| | YRVVSVLTVLHQDWLNGKEYKCKVSNKALPAPIEKTI | |
| | SKAKGQPREPQVYTLPPSRDELTKNQVSLSCAVKGFYP | |
| | SDIAVEWESNGQPENNYKTTPPVLDSDGSFFLVSKLTV | |
| | DKSRWQQGNVFSCSVMHEALHNHYTQKSLSLSPG | |
| mAb6 and | ELQLQESGPGLVKPSETLSLTCTVSGGSI [symbol] GWI | 170 |
| mAb6_2-HC | RQPPGKGLEWIG [symbol] SLKSRVTISVDTSKN | |
| | QFSLKLSSNYAADYANAAC [symbol] WGQG | |
| | TLVTVSSASTKGPSVFPLAPSSKSTSGGTAALGCLVKD | |
| | YFPEPVTVSWNSGALTSGVHTFPAVLQSSGLYSLSSVV | |
| | TVPSSSLGTQTYICNVNHKPSNTKVDKKVEPKSCDKTH | |
| | TCPPCPAPELLGGPSVFLFPPKPKDTLMISRTPEVTCVV | |
| | VDVSHEDPEVKFNWYVDGVEVHNAKTKPREEQYGST | |
| | YRVVSVLTVLHQDWLNGKEYKCKVSNKALPAPIEKTI | |
| | SKAKGQPREPQVYTLPPSRDELTKNQVSLTCLVKGFYP | |
| | SDIAVEWESNGQPENNYKTTPPVLDSDGSFFLYSKLTV | |
| | DKSRWQQGNVFSCSVMHEALHNHYTQKSLSLSPG | |
| mAb6 and | ELQLQESGPGLVKPSETLSLTCTVSGGSI [symbol] GWI | 171 |
| mAb6_2-HC | RQPPGKGLEWIG [symbol] SLKSRVTISVDTSKN | |
| (knob) | QFSLKLSSVYAADYAVAAC [symbol] WGQG | |
| | TLVTVSSASTKGPSVFPLAPSSKSTSGGTAALGCLVKD | |
| | YFPEPVTVSWNSGALTSGVHTFPAVLQSSGLYSLSSVV | |
| | TVPSSSLGTQTYICNVNHKPSNTKVDKKVEPKSCDKTH | |
| | TCPPCPAPELLGGPSVFLFPPKPKDTLMISRTPEVTCVV | |
| | VDVSHEDPEVKFNWYVDGVEVHNAKTKPREEQYGST | |
| | YRVVSVLTVLHQDWLNGKEYKCKVSNKALPAPIEKTI | |
| | SKAKGQPREPQVYTLPPSRDELTKNQVSLWCLVKGFY | |
| | PSDIAVEWESNGQPENNYKTTPPVLDSDGSFFLYSKLT | |
| | VDKSRWQQGNVFSCSVMHEALHNHYTQKSLSLSPG | |
| mAb6 and | ELQLQESGPGLVKPSETLSLTCTVSGGSI [symbol] GWI | 172 |
| mAb6_2-HC | RQPPGKGLEWIG [symbol] SLKSRVTISVDTSKN | |
| (hole) | QFSLKLSSNYAADYANAAC [symbol] WGQG | |
| | TLVTVSSASTKGPSVFPLAPSSKSTSGGTAALGCLVKD | |
| | YFPEPVTVSWNSGALTSGVHTFPAVLQSSGLYSLSSVV | |
| | TVPSSSLGTQTYICNVNHKPSNTKVDKKVEPKSCDKTH | |
| | TCPPCPAPELLGGPSVFLFPPKPKDTLMISRTPEVTCVV | |
| | VDVSHEDPEVKFNWYVDGVEVHNAKTKPREEQYGST | |
| | YRVVSVLTVLHQDWLNGKEYKCKVSNKALPAPIEKTI | |
| | SKAKGQPREPQVYTLPPSRDELTKNQVSLSCAVKGFYP | |
| | SDIAVEWESNGQPENNYKTTPPVLDSDGSFFLVSKLTV | |
| | DKSRWQQGNVFSCSVMHEALHNHYTQKSLSLSPG | |
| mAb6_2.1-HC | ELQLQESGPGLVKPSETLSLTCTVSGGSI [symbol] GWI | 173 |
| | RQPPGKGLEWIG [symbol] SLKSRVTISVDTSKN | |
| | QFSLKLSSVTAADTAVYYC [symbol] WGQG | |
| | TLVTVSSASTKGPSVFPLAPSSKSTSGGTAALGCLVKD | |
| | YFPEPVTVSWNSGALTSGVHTFPAVLQSSGLYSLSSVV | |
| | TVPSSSLGTQTYICNVNHKPSNTKVDKKVEPKSCDKTH | |
| | TCPPCPAPELLGGPSVFLFPPKPKDTLMISRTPEVTCVV | |
| | VDVSHEDPEVKFNWYVDGVEVHNAKTKPREEQYGST | |
| | YRVVSVLTVLHQDWLNGKEYKCKVSNKALPAPIEKTI | |
| | SKAKGQPREPQVYTLPPSRDELTKNQVSLTCLVKGFYP | |
| | SDIAVEWESNGQPENNYKTTPPVLDSDGSFFLYSKLTV | |
| | DKSRWQQGNVFSCSVMHEALHNHYTQKSLSLSPG | |
| mAb6_2.1-HC | ELQLQESGPGLVKPSETLSLTCTVSGGSI [symbol] GWI | 174 |
| (knob) | RQPPGKGLEWIG [symbol] SLKSRVTISVDTSKN | |
| | QFSLKLSSVTAADTAVYYC [symbol] WGQG | |
| | TLVTVSSASTKGPSVFPLAPSSKSTSGGTAALGCLVKD | |
| | YFPEPVTVSWNSGALTSGVHTFPAVLQSSGLYSLSSVV | |
| | TVPSSSLGTQTYICNVNHKPSNTKVDKKVEPKSCDKTH | |
| | TCPPCPAPELLGGPSVFLFPPKPKDTLMISRTPEVTCVV | |
| | VDVSHEDPEVKFNWYVDGVEVHNAKTKPREEQYGST | |
| | YRVVSVLTVLHQDWLNGKEYKCKVSNKALPAPIEKTI | |
| | SKAKGQPREPQVYTLPPSRDELTKNQVSLWCLVKGFY | |
| | PSDIAVEWESNGQPENNYKTTPPVLDSDGSFFLYSKLT | |
| | VDKSRWQQGNVFSCSVMHEALHNHYTQKSLSLSPG | |
| mAb6_2.1-HC | ELQLQESGPGLVKPSETLSLTCTVSGGSI [symbol] GWI | 175 |
| (hole) | RQPPGKGLEWIG [symbol] SLKSRVTISVDTSKN | |
| | QFSLKLSSVTAADTAVYYC [symbol] WGQG | |
| | TLVTVSSASTKGPSVFPLAPSSKSTSGGTAALGCLVKD | |
| | YFPEPVTVSWNSGALTSGVHTFPAVLQSSGLYSLSSVV | |
| | TVPSSSLGTQTYICNVNHKPSNTKVDKKVEPKSCDKTH | |
| | TCPPCPAPELLGGPSVFLFPPKPKDTLMISRTPEVTCVV | |
| | VDVSHEDPEVKFNWYVDGVEVHNAKTKPREEQYGST | |
| | YRVVSVLTVLHQDWLNGKEYKCKVSNKALPAPIEKTI | |
| | SKAKGQPREPQVYTLPPSRDELTKNQVSLSCAVKGFYP | |
| | SDIAVEWESNGQPENNYKTTPPVLDSDGSFFLVSKLTV | |
| | DKSRWQQGNVFSCSVMHEALHNHYTQKSLSLSPG | |
| mAb6_2.2-HC | ELQLQESGPGLVKPSETLSLTCTVSGGSI [symbol] GWI | 176 |
| | RQPPGKGLEWIG [symbol] SLKSRVTISVDTSKN | |
| | QFSLKLSSVTAADTAVYYC [symbol] WGQ | |
| | GTLVTVSSASTKGPSVFPLAPSSKSTSGGTAALGCLVK | |
| | DYFPEPVTVSWNSGALTSGVHTFPAVLQSSGLYSLSSV | |
| | VTVPSSSLGTQTYICNVNHKPSNTKVDKKVEPKSCDKT | |
| | HTCPPCPAPELLGGPSVFLFPPKPKDTLMISRTPEVTCV | |
| | VVDVSHEDPEVKFNWYVDGVEVHNAKTKPREEQYGS | |
| | TYRVVSVLTVLHQDWLNGKEYKCKVSNKALPAPIEKT | |
| | ISKAKGQPREPQVYTLPPSRDELTKNQVSLTCLVKGFY | |
| | PSDIAVEWESNGQPENNYKTTPPVLDSDGSFFLYSKLT | |
| | VDKSRWQQGNVFSCSVMHEALHNHYTQKSLSLSPG | |
| mAb6_2.2-HC | ELQLQESGPGLVKPSETLSLTCTVSGGSI [symbol] GWI | 177 |
| (knob) | RQPPGKGLEWIG [symbol] SLKSRVTISVDTSKN | |
| | QFSLKLSSVTAADTAVYYC [symbol] WGQ | |
| | GTLVTVSSASTKGPSVFPLAPSSKSTSGGTAALGCLVK | |
| | DYFPEPVTVSWNSGALTSGVHTFPAVLQSSGLYSLSSV | |
| | VTVPSSSLGTQTYICNVNHKPSNTKVDKKVEPKSCDKT | |
| | HTCPPCPAPELLGGPSVFLFPPKPKDTLMISRTPEVTCV | |
| | VVDVSHEDPEVKFNWYVDGVEVHNAKTKPREEQYGS | |
| | TYRVVSVLTVLHQDWLNGKEYKCKVSNKALPAPIEKT | |
| | ISKAKGQPREPQVYTLPPSRDELTKNQVSLWCLVKGFY | |
| | PSDIAVEWESNGQPENNYKTTPPVLDSDGSFFLYSKLT | |
| | VDKSRWQQGNVFSCSVMHEALHNHYTQKSLSLSPG | |
| mAb6_2.2-HC | ELQLQESGPGLVKPSETLSLTCTVSGGSI [symbol] GWI | 178 |
| (hole) | RQPPGKGLEWIG [symbol] SLKSRVTISVDTSKN | |
| | QFSLKLSSVTAADTAVYYC [symbol] WGQ | |
| | GTLVTVSSASTKGPSVFPLAPSSKSTSGGTAALGCLVK | |
| | DYFPEPVTVSWNSGALTSGVHTFPAVLQSSGLYSLSSV | |
| | VTVPSSSLGTQTYICNVNHKPSNTKVDKKVEPKSCDKT | |
| | HTCPPCPAPELLGGPSVFLFPPKPKDTLMISRTPEVTCV | |
| | VVDVSHEDPEVKFNWYVDGVEVHNAKTKPREEQYGS | |
| | TYRVVSVLTVLHQDWLNGKEYKCKVSNKALPAPIEKT | |
| | ISKAKGQPREPQVYTLPPSRDELTKNQVSLSCAVKGFY | |
| | PSDIAVEWESNGQPENNYKTTPPVLDSDGSFFLVSKLT | |
| | VDKSRWQQGNVFSCSVMHEALHNHYTQKSLSLSPG | |
| mAb6_2.3-HC | ELQLQESGPGLVKPSETLSLTCTVSGGSI [symbol] GWI | 179 |
| | RQPPGKGLEWIG [symbol] SLKSRVTISVDTSKN | |
| | QFSLKLSSVTAADTAVYYC [symbol] WGQG | |
| | TLVTVSSASTKGPSVFPLAPSSKSTSGGTAALGCLVKD | |
| | YFPEPVTVSWNSGALTSGVHTFPAVLQSSGLYSLSSVV | |
| | TVPSSSLGTQTYICNVNHKPSNTKVDKKVEPKSCDKTH | |
| | TCPPCPAPELLGGPSVFLFPPKPKDTLMISRTPEVTCVV | |
| | VDVSHEDPEVKFNWYVDGVEVHNAKTKPREEQYGST | |
| | YRVVSVLTVLHQDWLNGKEYKCKVSNKALPAPIEKTI | |
| | SKAKGQPREPQVYTLPPSRDELTKNQVSLTCLVKGFYP | |
| | SDIAVEWESNGQPENNYKTTPPVLDSDGSFFLYSKLTV | |
| | DKSRWQQGNVFSCSVMHEALHNHYTQKSLSLSPG | |
| mAb6_2.3-HC | ELQLQESGPGLVKPSETLSLTCTVSGGSI [symbol] GWI | 180 |
| (knob) | RQPPGKGLEWIG [symbol] SLKSRVTISVDTSKN | |
| | QFSLKLSSVTAADTAVYYC [symbol] WGQG | |
| | TLVTVSSASTKGPSVFPLAPSSKSTSGGTAALGCLVKD | |
| | YFPEPVTVSWNSGALTSGVHTFPAVLQSSGLYSLSSVV | |
| | TVPSSSLGTQTYICNVNHKPSNTKVDKKVEPKSCDKTH | |
| | TCPPCPAPELLGGPSVFLFPPKPKDTLMISRTPEVTCVV | |
| | VDVSHEDPEVKFNWYVDGVEVHNAKTKPREEQYGST | |
| | YRVVSVLTVLHQDWLNGKEYKCKVSNKALPAPIEKTI | |
| | SKAKGQPREPQVYTLPPSRDELTKNQVSLWCLVKGFY | |
| | PSDIAVEWESNGQPENNYKTTPPVLDSDGSFFLYSKLT | |
| | VDKSRWQQGNVFSCSVMHEALHNHYTQKSLSLSPG | |
| mAb6_2.3-HC | ELQLQESGPGLVKPSETLSLTCTVSGGSI [symbol] GWI | 181 |
| (hole) | RQPPGKGLEWIG [symbol] SLKSRVTISVDTSKN | |
| | QFSLKLSSVTAADTAVYYC [symbol] WGQG | |
| | TLVTVSSASTKGPSVFPLAPSSKSTSGGTAALGCLVKD | |
| | YFPEPVTVSWNSGALTSGVHTFPAVLQSSGLYSLSSVV | |
| | TVPSSSLGTQTYICNVNHKPSNTKVDKKVEPKSCDKTH | |
| | TCPPCPAPELLGGPSVFLFPPKPKDTLMISRTPEVTCVV | |
| | VDVSHEDPEVKFNWYVDGVEVHNAKTKPREEQYGST | |
| | YRVVSVLTVLHQDWLNGKEYKCKVSNKALPAPIEKTI | |
| | SKAKGQPREPQVYTLPPSRDELTKNQVSLSCAVKGFYP | |
| | SDIAVEWESNGQPENNYKTTPPVLDSDGSFFLVSKLTV | |
| | DKSRWQQGNVFSCSVMHEALHNHYTQKSLSLSPG | |
| mAb6_2.4-HC | ELQLQESGPGLVKPSETLSLTCTVSGGSI [symbol] GWI | 182 |
| | RQPPGKGLEWIG [symbol] SLKSRVTISVDTSKN | |
| | QFSLKLSSVTAADTAVYYC [symbol] WGQG | |
| | TLVTVSSASTKGPSVFPLAPSSKSTSGGTAALGCLVKD | |
| | YFPEPVTVSWNSGALTSGVHTFPAVLQSSGLYSLSSVV | |
| | TVPSSSLGTQTYICNVNHKPSNTKVDKKVEPKSCDKTH | |
| | TCPPCPAPELLGGPSVFLFPPKPKDTLMISRTPEVTCVV | |
| | VDVSHEDPEVKFNWYVDGVEVHNAKTKPREEQYGST | |
| | YRVVSVLTVLHQDWLNGKEYKCKVSNKALPAPIEKTI | |
| | SKAKGQPREPQVYTLPPSRDELTKNQVSLTCLVKGFYP | |
| | SDIAVEWESNGQPENNYKTTPPVLDSDGSFFLYSKLTV | |
| | DKSRWQQGNVFSCSVMHEALHNHYTQKSLSLSPG | |
| mAb6_2.4-HC | ELQLQESGPGLVKPSETLSLTCTVSGGSI [symbol] GWI | 183 |
| (knob) | RQPPGKGLEWIG [symbol] SLKSRVTISVDTSKN | |
| | QFSLKLSSVTAADTAVYYC [symbol] WGQG | |
| | TLVTVSSASTKGPSVFPLAPSSKSTSGGTAALGCLVKD | |
| | YFPEPVTVSWNSGALTSGVHTFPAVLQSSGLYSLSSVV | |
| | TVPSSSLGTQTYICNVNHKPSNTKVDKKVEPKSCDKTH | |
| | TCPPCPAPELLGGPSVFLFPPKPKDTLMISRTPEVTCVV | |
| | VDVSHEDPEVKFNWYVDGVEVHNAKTKPREEQYGST | |
| | YRVVSVLTVLHQDWLNGKEYKCKVSNKALPAPIEKTI | |
| | SKAKGQPREPQVYTLPPSRDELTKNQVSLWCLVKGFY | |
| | PSDIAVEWESNGQPENNYKTTPPVLDSDGSFFLYSKLT | |
| | VDKSRWQQGNVFSCSVMHEALHNHYTQKSLSLSPG | |
| mAb6_2.4-HC | ELQLQESGPGLVKPSETLSLTCTVSGGSI [symbol] GWI | 184 |
| (hole) | RQPPGKGLEWIG [symbol] SLKSRVTISVDTSKN | |
| | QFSLKLSSVTAADTAVYYC [symbol] WGQG | |
| | TLVTVSSASTKGPSVFPLAPSSKSTSGGTAALGCLVKD | |
| | YFPEPVTVSWNSGALTSGVHTFPAVLQSSGLYSLSSVV | |
| | TVPSSSLGTQTYICNVNHKPSNTKVDKKVEPKSCDKTH | |
| | TCPPCPAPELLGGPSVFLFPPKPKDTLMISRTPEVTCVV | |
| | VDVSHEDPEVKFNWYVDGVEVHNAKTKPREEQYGST | |
| | YRVVSVLTVLHQDWLNGKEYKCKVSNKALPAPIEKTI | |
| | SKAKGQPREPQVYTLPPSRDELTKNQVSLSCAVKGFYP | |
| | SDIAVEWESNGQPENNYKTTPPVLDSDGSFFLVSKLTV | |
| | DKSRWQQGNVFSCSVMHEALHNHYTQKSLSLSPG | |
| mAb6_2.5-HC | ELQLQESGPGLVKPSETLSLTCTVSGGSI [symbol] GWI | 185 |
| | RQPPGKGLEWIG [symbol] SLKSRVTISVDTSKN | |
| | QFSLKLSSVTAADTAVYYC [symbol] WGQG | |
| | TLVTVSSASTKGPSVFPLAPSSKSTSGGTAALGCLVKD | |
| | YFPEPVTVSWNSGALTSGVHTFPAVLQSSGLYSLSSVV | |
| | TVPSSSLGTQTYICNVNHKPSNTKVDKKVEPKSCDKTH | |
| | TCPPCPAPELLGGPSVFLFPPKPKDTLMISRTPEVTCVV | |
| | VDVSHEDPEVKFNWYVDGVEVHNAKTKPREEQYGST | |
| | YRVVSVLTVLHQDWLNGKEYKCKVSNKALPAPIEKTI | |
| | SKAKGQPREPQVYTLPPSRDELTKNQVSLTCLVKGFYP | |
| | SDIAVEWESNGQPENNYKTTPPVLDSDGSFFLYSKLTV | |
| | DKSRWQQGNVFSCSVMHEALHNHYTQKSLSLSPG | |
| mAb6_2.5-HC | ELQLQESGPGLVKPSETLSLTCTVSGGSI [symbol] GWI | 186 |
| (knob) | RQPPGKGLEWIG [symbol] SLKSRVTISVDTSKN | |
| | QFSLKLSSVTAADTAVYYC [symbol] WGQG | |
| | TLVTVSSASTKGPSVFPLAPSSKSTSGGTAALGCLVKD | |
| | YFPEPVTVSWNSGALTSGVHTFPAVLQSSGLYSLSSVV | |
| | TVPSSSLGTQTYICNVNHKPSNTKVDKKVEPKSCDKTH | |
| | TCPPCPAPELLGGPSVFLFPPKPKDTLMISRTPEVTCVV | |
| | VDVSHEDPEVKFNWYVDGVEVHNAKTKPREEQYGST | |
| | YRVVSVLTVLHQDWLNGKEYKCKVSNKALPAPIEKTI | |
| | SKAKGQPREPQVYTLPPSRDELTKNQVSLWCLVKGFY | |
| | PSDIAVEWESNGQPENNYKTTPPVLDSDGSFFLYSKLT | |
| | VDKSRWQQGNVFSCSVMHEALHNHYTQKSLSLSPG | |
| mAb6_2.5-HC | ELQLQESGPGLVKPSETLSLTCTVSGGSI [symbol] GWI | 187 |
| (hole) | RQPPGKGLEWIG [symbol] SLKSRVTISVDTSKN | |
| | QFSLKLSSVTAADTAVYYC [symbol] WGQG | |
| | TLVTVSSASTKGPSVFPLAPSSKSTSGGTAALGCLVKD | |
| | YFPEPVTVSWNSGALTSGVHTFPAVLQSSGLYSLSSVV | |
| | TVPSSSLGTQTYICNVNHKPSNTKVDKKVEPKSCDKTH | |
| | TCPPCPAPELLGGPSVFLFPPKPKDTLMISRTPEVTCVV | |
| | VDVSHEDPEVKFNWYVDGVEVHNAKTKPREEQYGST | |
| | YRVVSVLTVLHQDWLNGKEYKCKVSNKALPAPIEKTI | |
| | SKAKGQPREPQVYTLPPSRDELTKNQVSLSCAVKGFYP | |
| | SDIAVEWESNGQPENNYKTTPPVLDSDGSFFLVSKLTV | |
| | DKSRWQQGNVFSCSVMHEALHNHYTQKSLSLSPG | |
| mAb6_2.6-HC | ELQLQESGPGLVKPSETLSLTCTVSGGSI [symbol] GWI | 188 |
| | RQPPGKGLEWIG [symbol] SLKSRVTISVDTSKN | |
| | QFSLKLSSVTAADTAVYYC [symbol] WGQG | |
| | TLVTVSSASTKGPSVFPLAPSSKSTSGGTAALGCLVKD | |
| | YFPEPVTVSWNSGALTSGVHTFPAVLQSSGLYSLSSVV | |
| | TVPSSSLGTQTYICNVNHKPSNTKVDKKVEPKSCDKTH | |
| | TCPPCPAPELLGGPSVFLFPPKPKDTLMISRTPEVTCVV | |
| | VDVSHEDPEVKFNWYVDGVEVHNAKTKPREEQYGST | |
| | YRVVSVLTVLHQDWLNGKEYKCKVSNKALPAPIEKTI | |
| | SKAKGQPREPQVYTLPPSRDELTKNQVSLTCLVKGFYP | |
| | SDIAVEWESNGQPENNYKTTPPVLDSDGSFFLYSKLTV | |
| | DKSRWQQGNVFSCSVMHEALHNHYTQKSLSLSPG | |
| mAb6_2.6-HC | ELQLQESGPGLVKPSETLSLTCTVSGGSI [symbol] GWI | 189 |
| (knob) | RQPPGKGLEWIG [symbol] SLKSRVTISVDTSKN | |
| | QFSLKLSSVTAADTAVYYC [symbol] WGQG | |
| | TLVTVSSASTKGPSVFPLAPSSKSTSGGTAALGCLVKD | |
| | YFPEPVTVSWNSGALTSGVHTFPAVLQSSGLYSLSSVV | |
| | TVPSSSLGTQTYICNVNHKPSNTKVDKKVEPKSCDKTH | |
| | TCPPCPAPELLGGPSVFLFPPKPKDTLMISRTPEVTCVV | |
| | VDVSHEDPEVKFNWYVDGVEVHNAKTKPREEQYGST | |
| | YRVVSVLTVLHQDWLNGKEYKCKVSNKALPAPIEKTI | |
| | SKAKGQPREPQVYTLPPSRDELTKNQVSLWCLVKGFY | |
| | PSDIAVEWESNGQPENNYKTTPPVLDSDGSFFLYSKLT | |
| | VDKSRWQQGNVFSCSVMHEALHNHYTQKSLSLSPG | |
| mAb6_2.6-HC | ELQLQESGPGLVKPSETLSLTCTVSGGSI [symbol] GWI | 190 |
| (hole) | RQPPGKGLEWIG [symbol] SLKSRVTISVDTSKN | |
| | QFSLKLSSVTAADTAVYYC [symbol] WGQG | |
| | TLVTVSSASTKGPSVFPLAPSSKSTSGGTAALGCLVKD | |
| | YFPEPVTVSWNSGALTSGVHTFPAVLQSSGLYSLSSVV | |
| | TVPSSSLGTQTYICNVNHKPSNTKVDKKVEPKSCDKTH | |
| | TCPPCPAPELLGGPSVFLFPPKPKDTLMISRTPEVTCVV | |
| | VDVSHEDPEVKFNWYVDGVEVHNAKTKPREEQYGST | |
| | YRVVSVLTVLHQDWLNGKEYKCKVSNKALPAPIEKTI | |
| | SKAKGQPREPQVYTLPPSRDELTKNQVSLSCAVKGFYP | |
| | SDIAVEWESNGQPENNYKTTPPVLDSDGSFFLVSKLTV | |
| | DKSRWQQGNVFSCSVMHEALHNHYTQKSLSLSPG | |
| mAb6_2.7-HC | ELQLQESGPGLVKPSETLSLTCTVSGGSI [symbol] GWI | 191 |
| | RQPPGKGLEWIG [symbol] SLKSRVTISVDTSKN | |
| | QFSLKLSSVTAADTAVYYC [symbol] WGQG | |
| | TLVTVSSASTKGPSVFPLAPSSKSTSGGTAALGCLVKD | |
| | YFPEPVTVSWNSGALTSGVHTFPAVLQSSGLYSLSSVV | |
| | TVPSSSLGTQTYICNVNHKPSNTKVDKKVEPKSCDKTH | |
| | TCPPCPAPELLGGPSVFLFPPKPKDTLMISRTPEVTCVV | |
| | VDVSHEDPEVKFNWYVDGVEVHNAKTKPREEQYGST | |
| | YRVVSVLTVLHQDWLNGKEYKCKVSNKALPAPIEKTI | |
| | SKAKGQPREPQVYTLPPSRDELTKNQVSLTCLVKGFYP | |
| | SDIAVEWESNGQPENNYKTTPPVLDSDGSFFLYSKLTV | |
| | DKSRWQQGNVFSCSVMHEALHNHYTQKSLSLSPG | |
| mAb6_2.7-HC | ELQLQESGPGLVKPSETLSLTCTVSGGSI [symbol] GWI | 192 |
| (knob) | RQPPGKGLEWIG [symbol] SLKSRVTISVDTSKN | |
| | QFSLKLSSVTAADTAVYYC [symbol] WGQG | |
| | TLVTVSSASTKGPSVFPLAPSSKSTSGGTAALGCLVKD | |
| | YFPEPVTVSWNSGALTSGVHTFPAVLQSSGLYSLSSVV | |
| | TVPSSSLGTQTYICNVNHKPSNTKVDKKVEPKSCDKTH | |
| | TCPPCPAPELLGGPSVFLFPPKPKDTLMISRTPEVTCVV | |
| | VDVSHEDPEVKFNWYVDGVEVHNAKTKPREEQYGST | |
| | YRVVSVLTVLHQDWLNGKEYKCKVSNKALPAPIEKTI | |
| | SKAKGQPREPQVYTLPPSRDELTKNQVSLWCLVKGFY | |
| | PSDIAVEWESNGQPENNYKTTPPVLDSDGSFFLYSKLT | |
| | VDKSRWQQGNVFSCSVMHEALHNHYTQKSLSLSPG | |
| mAb6_2.7-HC | ELQLQESGPGLVKPSETLSLTCTVSGGSI [symbol] GWI | 193 |
| (hole) | RQPPGKGLEWIG [symbol] SLKSRVTISVDTSKN | |
| | QFSLKLSSVTAADTAVYYC [symbol] WGQG | |
| | TLVTVSSASTKGPSVFPLAPSSKSTSGGTAALGCLVKD | |
| | YFPEPVTVSWNSGALTSGVHTFPAVLQSSGLYSLSSVV | |
| | TVPSSSLGTQTYICNVNHKPSNTKVDKKVEPKSCDKTH | |
| | TCPPCPAPELLGGPSVFLFPPKPKDTLMISRTPEVTCVV | |
| | VDVSHEDPEVKFNWYVDGVEVHNAKTKPREEQYGST | |
| | YRVVSVLTVLHQDWLNGKEYKCKVSNKALPAPIEKTI | |
| | SKAKGQPREPQVYTLPPSRDELTKNQVSLSCAVKGFYP | |
| | SDIAVEWESNGQPENNYKTTPPVLDSDGSFFLVSKLTV | |
| | DKSRWQQGNVFSCSVMHEALHNHYTQKSLSLSPG | |
| mAb6_2.8-HC | ELQLQESGPGLVKPSETLSLTCTVSGGSI [symbol] GWI | 194 |
| | RQPPGKGLEWIG [symbol] SLKSRVTISVDTSKN | |
| | QFSLKLSSVTAADTAVYYC [symbol] WGQG | |
| | TLVTVSSASTKGPSVFPLAPSSKSTSGGTAALGCLVKD | |
| | YFPEPVTVSWNSGALTSGVHTFPAVLQSSGLYSLSSVV | |
| | TVPSSSLGTQTYICNVNHKPSNTKVDKKVEPKSCDKTH | |
| | TCPPCPAPELLGGPSVFLFPPKPKDTLMISRTPEVTCVV | |
| | VDVSHEDPEVKFNWYVDGVEVHNAKTKPREEQYGST | |
| | YRVVSVLTVLHQDWLNGKEYKCKVSNKALPAPIEKTI | |
| | SKAKGQPREPQVYTLPPSRDELTKNQVSLTCLVKGFYP | |
| | SDIAVEWESNGQPENNYKTTPPVLDSDGSFFLYSKLTV | |
| | DKSRWQQGNVFSCSVMHEALHNHYTQKSLSLSPG | |
| mAb6_2.8-HC | ELQLQESGPGLVKPSETLSLTCTVSGGSI [symbol] GWI | 195 |
| (knob) | RQPPGKGLEWIG [symbol] SLKSRVTISVDTSKN | |
| | QFSLKLSSVTAADTAVYYC [symbol] WGQG | |
| | TLVTVSSASTKGPSVFPLAPSSKSTSGGTAALGCLVKD | |
| | YFPEPVTVSWNSGALTSGVHTFPAVLQSSGLYSLSSVV | |
| | TVPSSSLGTQTYICNVNHKPSNTKVDKKVEPKSCDKTH | |
| | TCPPCPAPELLGGPSVFLFPPKPKDTLMISRTPEVTCVV | |
| | VDVSHEDPEVKFNWYVDGVEVHNAKTKPREEQYGST | |
| | YRVVSVLTVLHQDWLNGKEYKCKVSNKALPAPIEKTI | |
| | SKAKGQPREPQVYTLPPSRDELTKNQVSLWCLVKGFY | |
| | PSDIAVEWESNGQPENNYKTTPPVLDSDGSFFLYSKLT | |
| | VDKSRWQQGNVFSCSVMHEALHNHYTQKSLSLSPG | |
| mAb6_2.8-HC | ELQLQESGPGLVKPSETLSLTCTVSGGSI [symbol] GWI | 196 |
| (hole) | RQPPGKGLEWIG [symbol] SLKSRVTISVDTSKN | |
| | QFSLKLSSVTAADTAVYYC [symbol] WGQG | |
| | TLVTVSSASTKGPSVFPLAPSSKSTSGGTAALGCLVKD | |
| | YFPEPVTVSWNSGALTSGVHTFPAVLQSSGLYSLSSVV | |
| | TVPSSSLGTQTYICNVNHKPSNTKVDKKVEPKSCDKTH | |
| | TCPPCPAPELLGGPSVFLFPPKPKDTLMISRTPEVTCVV | |
| | VDVSHEDPEVKFNWYVDGVEVHNAKTKPREEQYGST | |
| | YRVVSVLTVLHQDWLNGKEYKCKVSNKALPAPIEKTI | |
| | SKAKGQPREPQVYTLPPSRDELTKNQVSLSCAVKGFYP | |
| | SDIAVEWESNGQPENNYKTTPPVLDSDGSFFLVSKLTV | |
| | DKSRWQQGNVFSCSVMHEALHNHYTQKSLSLSPG | |
| mAb6_2.9-HC | ELQLQESGPGLVKPSETLSLTCTVSGGSI [symbol] GWI | 197 |
| | RQPPGKGLEWIG [symbol] SLKSRVTISVDTSKN | |
| | QFSLKLSSVTAADTAVYYC [symbol] WGQG | |
| | TLVTVSSASTKGPSVFPLAPSSKSTSGGTAALGCLVKD | |
| | YFPEPVTVSWNSGALTSGVHTFPAVLQSSGLYSLSSVV | |
| | TVPSSSLGTQTYICNVNHKPSNTKVDKKVEPKSCDKTH | |
| | TCPPCPAPELLGGPSVFLFPPKPKDTLMISRTPEVTCVV | |
| | VDVSHEDPEVKFNWYVDGVEVHNAKTKPREEQYGST | |
| | YRVVSVLTVLHQDWLNGKEYKCKVSNKALPAPIEKTI | |
| | SKAKGQPREPQVYTLPPSRDELTKNQVSLTCLVKGFYP | |
| | SDIAVEWESNGQPENNYKTTPPVLDSDGSFFLYSKLTV | |
| | DKSRWQQGNVFSCSVMHEALHNHYTQKSLSLSPG | |
| mAb6_2.9-HC | ELQLQESGPGLVKPSETLSLTCTVSGGSI [symbol] GWI | 198 |
| (knob) | RQPPGKGLEWIG [symbol] SLKSRVTISVDTSKN | |
| | QFSLKLSSVTAADTAVYYC [symbol] WGQG | |
| | TLVTVSSASTKGPSVFPLAPSSKSTSGGTAALGCLVKD | |
| | YFPEPVTVSWNSGALTSGVHTFPAVLQSSGLYSLSSVV | |
| | TVPSSSLGTQTYICNVNHKPSNTKVDKKVEPKSCDKTH | |
| | TCPPCPAPELLGGPSVFLFPPKPKDTLMISRTPEVTCVV | |
| | VDVSHEDPEVKFNWYVDGVEVHNAKTKPREEQYGST | |
| | YRVVSVLTVLHQDWLNGKEYKCKVSNKALPAPIEKTI | |
| | SKAKGQPREPQVYTLPPSRDELTKNQVSLWCLVKGFY | |
| | PSDIAVEWESNGQPENNYKTTPPVLDSDGSFFLYSKLT | |
| | VDKSRWQQGNVFSCSVMHEALHNHYTQKSLSLSPG | |
| mAb6_2.9-HC | ELQLQESGPGLVKPSETLSLTCTVSGGSI [symbol] GWI | 199 |
| (hole) | RQPPGKGLEWIG [symbol] SLKSRVTISVDTSKN | |
| | QFSLKLSSVTAADTAVYYC [symbol] WGQG | |
| | TLVTVSSASTKGPSVFPLAPSSKSTSGGTAALGCLVKD | |
| | YFPEPVTVSWNSGALTSGVHTFPAVLQSSGLYSLSSVV | |
| | TVPSSSLGTQTYICNVNHKPSNTKVDKKVEPKSCDKTH | |
| | TCPPCPAPELLGGPSVFLFPPKPKDTLMISRTPEVTCVV | |
| | VDVSHEDPEVKFNWYVDGVEVHNAKTKPREEQYGST | |
| | YRVVSVLTVLHQDWLNGKEYKCKVSNKALPAPIEKTI | |
| | SKAKGQPREPQVYTLPPSRDELTKNQVSLSCAVKGFYP | |
| | SDIAVEWESNGQPENNYKTTPPVLDSDGSFFLVSKLTV | |
| | DKSRWQQGNVFSCSVMHEALHNHYTQKSLSLSPG | |
| mAb6_2.10-HC | ELQLQESGPGLVKPSETLSLTCTVSGGSI [symbol] GWI | 200 |
| | RQPPGKGLEWIG [symbol] SLKSRVTISVDTSKN | |
| | QFSLKLSSVTAADTAVYYC [symbol] WGQ | |
| | GTLVTVSSASTKGPSVFPLAPSSKSTSGGTAALGCLVK | |
| | DYFPEPVTVSWNSGALTSGVHTFPAVLQSSGLYSLSSV | |
| | VTVPSSSLGTQTYICNVNHKPSNTKVDKKVEPKSCDKT | |
| | HTCPPCPAPELLGGPSVFLFPPKPKDTLMISRTPEVTCV | |
| | VVDVSHEDPEVKFNWYVDGVEVHNAKTKPREEQYGS | |
| | TYRVVSVLTVLHQDWLNGKEYKCKVSNKALPAPIEKT | |
| | ISKAKGQPREPQVYTLPPSRDELTKNQVSLTCLVKGFY | |
| | PSDIAVEWESNGQPENNYKTTPPVLDSDGSFFLYSKLT | |
| | VDKSRWQQGNVFSCSVMHEALHNHYTQKSLSLSPG | |
| mAb6_2.10-HC | ELQLQESGPGLVKPSETLSLTCTVSGGSI [symbol] GWI | 201 |
| (knob) | RQPPGKGLEWIG [symbol] SLKSRVTISVDTSKN | |
| | QFSLKLSSVYAADYAVAAC [symbol] WGQ | |
| | GTLVTVSSASTKGPSVFPLAPSSKSTSGGTAALGCLVK | |
| | DYFPEPVTVSWNSGALTSGVHTFPAVLQSSGLYSLSSV | |
| | VTVPSSSLGTQTYICNVNHKPSNTKVDKKVEPKSCDKT | |
| | HTCPPCPAPELLGGPSVFLFPPKPKDTLMISRTPEVTCV | |
| | VVDVSHEDPEVKFNWYVDGVEVHNAKTKPREEQYGS | |
| | TYRVVSVLTVLHQDWLNGKEYKCKVSNKALPAPIEKT | |
| | ISKAKGQPREPQVYTLPPSRDELTKNQVSLWCLVKGFY | |
| | PSDIAVEWESNGQPENNYKTTPPVLDSDGSFFLYSKLT | |
| | VDKSRWQQGNVFSCSVMHEALHNHYTQKSLSLSPG | |
| mAb6_2.10-HC | ELQLQESGPGLVKPSETLSLTCTVSGGSI [symbol] GWI | 202 |
| (hole) | RQPPGKGLEWIG [symbol] SLKSRVTISVDTSKN | |
| | QFSLKLSSVYAADYAVYYC [symbol] WGQ | |
| | GTLVTVSSASTKGPSVFPLAPSSKSTSGGTAALGCLVK | |
| | DYFPEPVTVSWNSGALTSGVHTFPAVLQSSGLYSLSSV | |
| | VTVPSSSLGTQTYICNVNHKPSNTKVDKKVEPKSCDKT | |
| | HTCPPCPAPELLGGPSVFLFPPKPKDTLMISRTPEVTCV | |
| | VVDVSHEDPEVKFNWYVDGVEVHNAKTKPREEQYGS | |
| | TYRVVSVLTVLHQDWLNGKEYKCKVSNKALPAPIEKT | |
| | ISKAKGQPREPQVYTLPPSRDELTKNQVSLSCAVKGFY | |
| | PSDIAVEWESNGQPENNYKTTPPVLDSDGSFFLVSKLT | |
| | VDKSRWQQGNVFSCSVMHEALHNHYTQKSLSLSPG | |
| mAb2.0-HC | QLQLQESGPGLVKPSETLSLTCTVSGGSI [symbol] GWI | 243 |
| | RQPPGKGLEWIG [symbol] SLKSRVTISVDTSKN | |
| | QFSLKLSSVYAADYAVAAC [symbol] WGQ | |
| | GTLVTVSSASTKGPSVFPLAPSSKSTSGGTAALGCLVK | |
| | DYFPEPVTVSWNSGALTSGVHTFPAVLQSSGLYSLSSV | |
| | VTVPSSSLGTQTYICNVNHKPSNTKVDKKVEPKSCDKT | |
| | HTCPPCPAPELLGGPSVFLFPPKPKDTLMISRTPEVTCV | |
| | VVDVSHEDPEVKFNWYVDGVEVHNAKTKPREEQYGS | |
| | TYRVVSVLTVLHQDWLNGKEYKCKVSNKALPAPIEKT | |
| | ISKAKGQPREPQVYTLPPSRDELTKNQVSLTCLVKGFY | |
| | PSDIAVEWESNGQPENNYKTTPPVLDSDGSFFLYSKLT | |
| | VDKSRWQQGNVFSCSVMHEALHNHYTQKSLSLSPG | |
| mAb2.0-HC | QLQLQESGPGLVKPSETLSLTCTVSGGSI [symbol] GWI | 244 |
| (knob) | RQPPGKGLEWIG [symbol] SLKSRVTISVDTSKN | |
| | QFSLKLSSVTAADTAVYYC [symbol] WGQ | |
| | GTLVTVSSASTKGPSVFPLAPSSKSTSGGTAALGCLVK | |
| | DYFPEPVTVSWNSGALTSGVHTFPAVLQSSGLYSLSSV | |
| | VTVPSSSLGTQTYICNVNHKPSNTKVDKKVEPKSCDKT | |
| | HTCPPCPAPELLGGPSVFLFPPKPKDTLMISRTPEVTCV | |
| | VVDVSHEDPEVKFNWYVDGVEVHNAKTKPREEQYGS | |
| | TYRVVSVLTVLHQDWLNGKEYKCKVSNKALPAPIEKT | |
| | ISKAKGQPREPQVYTLPPSRDELTKNQVSLWCLVKGFY | |
| | PSDIAVEWESNGQPENNYKTTPPVLDSDGSFFLYSKLT | |
| | VDKSRWQQGNVFSCSVMHEALHNHYTQKSLSLSPG | |
| mAb2.0-HC | QLQLQESGPGLVKPSETLSLTCTVSGGSI [symbol] GWI | 245 |
| (hole) | RQPPGKGLEWIG [symbol] SLKSRVTISVDTSKN | |
| | QFSLKLSSVTAADTAVYYC [symbol] WGQ | |
| | GTLVTVSSASTKGPSVFPLAPSSKSTSGGTAALGCLVK | |
| | DYFPEPVTVSWNSGALTSGVHTFPAVLQSSGLYSLSSV | |
| | VTVPSSSLGTQTYICNVNHKPSNTKVDKKVEPKSCDKT | |
| | HTCPPCPAPELLGGPSVFLFPPKPKDTLMISRTPEVTCV | |
| | VVDVSHEDPEVKFNWYVDGVEVHNAKTKPREEQYGS | |
| | TYRVVSVLTVLHQDWLNGKEYKCKVSNKALPAPIEKT | |
| | ISKAKGQPREPQVYTLPPSRDELTKNQVSLSCAVKGFY | |
| | PSDIAVEWESNGQPENNYKTTPPVLDSDGSFFLVSKLT | |
| | VDKSRWQQGNVFSCSVMHEALHNHYTQKSLSLSPG | |
| mAb2.0 and | QSVLTQPPSVSGAPGQRVTISC [symbol] WY | 246 |
| mAb6.0_2.0-LC | QQLPGTAPKLLIY [symbol] GVPDRFSGSKSGTSASLAI | |
| | TGLQAEDEADYYC [symbol] FGGGTKLTVLGQP | |
| | KAAPSVTLFPPSSEELQANKATLVCLISDFYPGAVTVA | |
| | WKADSSPVKAGVETTTPSKQSNNKYAASSYLSLTPEQ | |
| | WKSHKSYSCQVTHEGSTVEKTVAPTECS | |
| mAb2-HC | ELQLQESGPGLVKPSETLSLTCTVSGGSI [symbol] GWI | 203 |
| | RQPPGKGLEWIG [symbol] SLKSRVTISVDTSKN | |
| | QFSLKLSSVTAADTAVYYC [symbol] WGQ | |
| | GTLVTVSSASTKGPSVFPLAPSSKSTSGGTAALGCLVK | |
| | DYFPEPVTVSWNSGALTSGVHTFPAVLQSSGLYSLSSV | |
| | VTVPSSSLGTQTYICNVNHKPSNTKVDKKVEPKSCDKT | |
| | HTCPPCPAPELLGGPSVFLFPPKPKDTLMISRTPEVTCV | |
| | VVDVSHEDPEVKFNWYVDGVEVHNAKTKPREEQYGS | |
| | TYRVVSVLTVLHQDWLNGKEYKCKVSNKALPAPIEKT | |
| | ISKAKGQPREPQVYTLPPSRDELTKNQVSLTCLVKGFY | |
| | PSDIAVEWESNGQPENNYKTTPPVLDSDGSFFLYSKLT | |
| | VDKSRWQQGNVFSCSVMHEALHNHYTQKSLSLSPG | |
| mAb2-HC | ELQLQESGPGLVKPSETLSLTCTVSGGSI [symbol] GWI | 204 |
| (knob) | RQPPGKGLEWIG [symbol] SLKSRVTISVDTSKN | |
| | QFSLKLSSVTAADTAVYYC [symbol] WGQ | |
| | GTLVTVSSASTKGPSVFPLAPSSKSTSGGTAALGCLVK | |
| | DYFPEPVTVSWNSGALTSGVHTFPAVLQSSGLYSLSSV | |
| | VTVPSSSLGTQTYICNVNHKPSNTKVDKKVEPKSCDKT | |
| | HTCPPCPAPELLGGPSVFLFPPKPKDTLMISRTPEVTCV | |
| | VVDVSHEDPEVKFNWYVDGVEVHNAKTKPREEQYGS | |
| | TYRVVSVLTVLHQDWLNGKEYKCKVSNKALPAPIEKT | |
| | ISKAKGQPREPQVYTLPPSRDELTKNQVSLWCLVKGFY | |
| | PSDIAVEWESNGQPENNYKTTPPVLDSDGSFFLYSKLT | |
| | VDKSRWQQGNVFSCSVMHEALHNHYTQKSLSLSPG | |
| mAb2-HC | ELQLQESGPGLVKPSETLSLTCTVSGGSI [symbol] GWI | 205 |
| (hole) | RQPPGKGLEWIG [symbol] SLKSRVTISVDTSKN | |
| | QFSLKLSSVTAADTAVYYC [symbol] WGQ | |
| | GTLVTVSSASTKGPSVFPLAPSSKSTSGGTAALGCLVK | |
| | DYFPEPVTVSWNSGALTSGVHTFPAVLQSSGLYSLSSV | |
| | VTVPSSSLGTQTYICNVNHKPSNTKVDKKVEPKSCDKT | |
| | HTCPPCPAPELLGGPSVFLFPPKPKDTLMISRTPEVTCV | |
| | VVDVSHEDPEVKFNWYVDGVEVHNAKTKPREEQYGS | |
| | TYRVVSVLTVLHQDWLNGKEYKCKVSNKALPAPIEKT | |
| | ISKAKGQPREPQVYTLPPSRDELTKNQVSLSCAVKGFY | |
| | PSDIAVEWESNGQPENNYKTTPPVLDSDGSFFLVSKLT | |
| | VDKSRWQQGNVFSCSVMHEALHNHYTQKSLSLSPG | |
| mAb2.1-HC | ELQLQESGPGLVKPSETLSLTCTVSGGSI [symbol] GWI | 206 |
| | RQPPGKGLEWIG [symbol] SLKSRVTISVDTSKN | |
| | QFSLKLSSVTAADTAVYYC [symbol] WGQ | |
| | GTLVTVSSASTKGPSVFPLAPSSKSTSGGTAALGCLVK | |
| | DYFPEPVTVSWNSGALTSGVHTFPAVLQSSGLYSLSSV | |
| | VTVPSSSLGTQTYICNVNHKPSNTKVDKKVEPKSCDKT | |
| | HTCPPCPAPELLGGPSVFLFPPKPKDTLMISRTPEVTCV | |
| | VVDVSHEDPEVKFNWYVDGVEVHNAKTKPREEQYGS | |
| | TYRVVSVLTVLHQDWLNGKEYKCKVSNKALPAPIEKT | |
| | ISKAKGQPREPQVYTLPPSRDELTKNQVSLTCLVKGFY | |
| | PSDIAVEWESNGQPENNYKTTPPVLDSDGSFFLYSKLT | |
| | VDKSRWQQGNVFSCSVMHEALHNHYTQKSLSLSPG | |
| mAb2.1-HC | ELQLQESGPGLVKPSETLSLTCTVSGGSI [symbol] GWI | 207 |
| (knob) | RQPPGKGLEWIG [symbol] SLKSRVTISVDTSKN | |
| | QFSLKLSSVTAADTAVYYC [symbol] WGQ | |
| | GTLVTVSSASTKGPSVFPLAPSSKSTSGGTAALGCLVK | |
| | DYFPEPVTVSWNSGALTSGVHTFPAVLQSSGLYSLSSV | |
| | VTVPSSSLGTQTYICNVNHKPSNTKVDKKVEPKSCDKT | |
| | HTCPPCPAPELLGGPSVFLFPPKPKDTLMISRTPEVTCV | |
| | VVDVSHEDPEVKFNWYVDGVEVHNAKTKPREEQYGS | |
| | TYRVVSVLTVLHQDWLNGKEYKCKVSNKALPAPIEKT | |
| | ISKAKGQPREPQVYTLPPSRDELTKNQVSLWCLVKGFY | |
| | PSDIAVEWESNGQPENNYKTTPPVLDSDGSFFLYSKLT | |
| | VDKSRWQQGNVFSCSVMHEALHNHYTQKSLSLSPG | |
| mAb2.1-HC | ELQLQESGPGLVKPSETLSLTCTVSGGSI [symbol] GWI | 208 |
| (hole) | RQPPGKGLEWIG [symbol] SLKSRVTISVDTSKN | |
| | QFSLKLSSVTAADTAVYYC [symbol] WGQ | |
| | GTLVTVSSASTKGPSVFPLAPSSKSTSGGTAALGCLVK | |
| | DYFPEPVTVSWNSGALTSGVHTFPAVLQSSGLYSLSSV | |
| | VTVPSSSLGTQTYICNVNHKPSNTKVDKKVEPKSCDKT | |
| | HTCPPCPAPELLGGPSVFLFPPKPKDTLMISRTPEVTCV | |
| | VVDVSHEDPEVKFNWYVDGVEVHNAKTKPREEQYGS | |
| | TYRVVSVLTVLHQDWLNGKEYKCKVSNKALPAPIEKT | |
| | ISKAKGQPREPQVYTLPPSRDELTKNQVSLSCAVKGFY | |
| | PSDIAVEWESNGQPENNYKTTPPVLDSDGSFFLVSKLT | |
| | VDKSRWQQGNVFSCSVMHEALHNHYTQKSLSLSPG | |
| mAb2.2-HC | ELQLQESGPGLVKPSETLSLTCTVSGGSI [symbol] GWI | 209 |
| | RQPPGKGLEWIG [symbol] SLKSRVTISVDTSKN | |
| | QFSLKLSSVTAADTAVYYC [symbol] WG | |
| | QGTLVTVSSASTKGPSVFPLAPSSKSTSGGTAALGCLV | |
| | KDYFPEPVTVSWNSGALTSGVHTFPAVLQSSGLYSLSS | |
| | VVTVPSSSLGTQTYICNVNHKPSNTKVDKKVEPKSCD | |
| | KTHTCPPCPAPELLGGPSVFLFPPKPKDTLMISRTPEVT | |
| | CVVVDVSHEDPEVKFNWYVDGVEVHNAKTKPREEQY | |
| | GSTYRVVSVLTVLHQDWLNGKEYKCKVSNKALPAPIE | |
| | KTISKAKGQPREPQVYTLPPSRDELTKNQVSLTCLVKG | |
| | FYPSDIAVEWESNGQPENNYKTTPPVLDSDGSFFLYSK | |
| | LTVDKSRWQQGNVFSCSVMHEALHNHYTQKSLSLSPG | |
| mAb2.2-HC | ELQLQESGPGLVKPSETLSLTCTVSGGSI [symbol] GWI | 210 |
| (knob) | RQPPGKGLEWIG [symbol] SLKSRVTISVDTSKN | |
| | QFSLKLSSVTAADTAVYYC [symbol] WG | |
| | QGTLVTVSSASTKGPSVFPLAPSSKSTSGGTAALGCLV | |
| | KDYFPEPVTVSWNSGALTSGVHTFPAVLQSSGLYSLSS | |
| | VVTVPSSSLGTQTYICNVNHKPSNTKVDKKVEPKSCD | |
| | KTHTCPPCPAPELLGGPSVFLFPPKPKDTLMISRTPEVT | |
| | CVVVDVSHEDPEVKFNWYVDGVEVHNAKTKPREEQY | |
| | GSTYRVVSVLTVLHQDWLNGKEYKCKVSNKALPAPIE | |
| | KTISKAKGQPREPQVYTLPPSRDELTKNQVSLWCLVK | |
| | GFYPSDIAVEWESNGQPENNYKTTPPVLDSDGSFFLYS | |
| | KLTVDKSRWQQGNVFSCSVMHEALHNHYTQKSLSLSP | |
| | G | |
| mAb2.2-HC | ELQLQESGPGLVKPSETLSLTCTVSGGSI [symbol] GWI | 211 |
| (hole) | RQPPGKGLEWIG [symbol] SLKSRVTISVDTSKN | |
| | QFSLKLSSVTAADTAVYYC [symbol] WG | |
| | QGTLVTVSSASTKGPSVFPLAPSSKSTSGGTAALGCLV | |
| | KDYFPEPVTVSWNSGALTSGVHTFPAVLQSSGLYSLSS | |
| | VVTVPSSSLGTQTYICNVNHKPSNTKVDKKVEPKSCD | |
| | KTHTCPPCPAPELLGGPSVFLFPPKPKDTLMISRTPEVT | |
| | CVVVDVSHEDPEVKFNWYVDGVEVHNAKTKPREEQY | |
| | GSTYRVVSVLTVLHQDWLNGKEYKCKVSNKALPAPIE | |
| | KTISKAKGQPREPQVYTLPPSRDELTKNQVSLSCAVKG | |
| | FYPSDIAVEWESNGQPENNYKTTPPVLDSDGSFFLVSK | |
| | LTVDKSRWQQGNVFSCSVMHEALHNHYTQKSLSLSPG | |
| mAb2.3-HC | ELQLQESGPGLVKPSETLSLTCTVSGGSI [symbol] GWI | 212 |
| | RQPPGKGLEWIG [symbol] SLKSRVTISVDTSKN | |
| | QFSLKLSSVTAADTAVYYC [symbol] WGQ | |
| | GTLVTVSSASTKGPSVFPLAPSSKSTSGGTAALGCLVK | |
| | DYFPEPVTVSWNSGALTSGVHTFPAVLQSSGLYSLSSV | |
| | VTVPSSSLGTQTYICNVNHKPSNTKVDKKVEPKSCDKT | |
| | HTCPPCPAPELLGGPSVFLFPPKPKDTLMISRTPEVTCV | |
| | VVDVSHEDPEVKFNWYVDGVEVHNAKTKPREEQYGS | |
| | TYRVVSVLTVLHQDWLNGKEYKCKVSNKALPAPIEKT | |
| | ISKAKGQPREPQVYTLPPSRDELTKNQVSLTCLVKGFY | |
| | PSDIAVEWESNGQPENNYKTTPPVLDSDGSFFLYSKLT | |
| | VDKSRWQQGNVFSCSVMHEALHNHYTQKSLSLSPG | |
| mAb2.3-HC | ELQLQESGPGLVKPSETLSLTCTVSGGSI [symbol] GWI | 213 |
| (knob) | RQPPGKGLEWIG [symbol] SLKSRVTISVDTSKN | |
| | QFSLKLSSVTAADTAVYYC [symbol] WGQ | |
| | GTLVTVSSASTKGPSVFPLAPSSKSTSGGTAALGCLVK | |
| | DYFPEPVTVSWNSGALTSGVHTFPAVLQSSGLYSLSSV | |
| | VTVPSSSLGTQTYICNVNHKPSNTKVDKKVEPKSCDKT | |
| | HTCPPCPAPELLGGPSVFLFPPKPKDTLMISRTPEVTCV | |
| | VVDVSHEDPEVKFNWYVDGVEVHNAKTKPREEQYGS | |
| | TYRVVSVLTVLHQDWLNGKEYKCKVSNKALPAPIEKT | |
| | ISKAKGQPREPQVYTLPPSRDELTKNQVSLWCLVKGFY | |
| | PSDIAVEWESNGQPENNYKTTPPVLDSDGSFFLYSKLT | |
| | VDKSRWQQGNVFSCSVMHEALHNHYTQKSLSLSPG | |
| mAb2.3-HC | ELQLQESGPGLVKPSETLSLTCTVSGGSI [symbol] GWI | 214 |
| (hole) | RQPPGKGLEWIG [symbol] SLKSRVTISVDTSKN | |
| | QFSLKLSSVTAADTAVYYC [symbol] WGQ | |
| | GTLVTVSSASTKGPSVFPLAPSSKSTSGGTAALGCLVK | |
| | DYFPEPVTVSWNSGALTSGVHTFPAVLQSSGLYSLSSV | |
| | VTVPSSSLGTQTYICNVNHKPSNTKVDKKVEPKSCDKT | |
| | HTCPPCPAPELLGGPSVFLFPPKPKDTLMISRTPEVTCV | |
| | VVDVSHEDPEVKFNWYVDGVEVHNAKTKPREEQYGS | |
| | TYRVVSVLTVLHQDWLNGKEYKCKVSNKALPAPIEKT | |
| | ISKAKGQPREPQVYTLPPSRDELTKNQVSLSCAVKGFY | |
| | PSDIAVEWESNGQPENNYKTTPPVLDSDGSFFLVSKLT | |
| | VDKSRWQQGNVFSCSVMHEALHNHYTQKSLSLSPG | |
| mAb2.4-HC | ELQLQESGPGLVKPSETLSLTCTVSGGSI [symbol] GWI | 215 |
| | RQPPGKGLEWIG [symbol] SLKSRVTISVDTSKN | |
| | QFSLKLSSVTAADTAVYYC [symbol] WGQ | |
| | GTLVTVSSASTKGPSVFPLAPSSKSTSGGTAALGCLVK | |
| | DYFPEPVTVSWNSGALTSGVHTFPAVLQSSGLYSLSSV | |
| | VTVPSSSLGTQTYICNVNHKPSNTKVDKKVEPKSCDKT | |
| | HTCPPCPAPELLGGPSVFLFPPKPKDTLMISRTPEVTCV | |
| | VVDVSHEDPEVKFNWYVDGVEVHNAKTKPREEQYGS | |
| | TYRVVSVLTVLHQDWLNGKEYKCKVSNKALPAPIEKT | |
| | ISKAKGQPREPQVYTLPPSRDELTKNQVSLTCLVKGFY | |
| | PSDIAVEWESNGQPENNYKTTPPVLDSDGSFFLYSKLT | |
| | VDKSRWQQGNVFSCSVMHEALHNHYTQKSLSLSPG | |
| mAb2.4-HC | ELQLQESGPGLVKPSETLSLTCTVSGGSI [symbol] GWI | 216 |
| (knob) | RQPPGKGLEWIG [symbol] SLKSRVTISVDTSKN | |
| | QFSLKLSSVTAADTAVYYC [symbol] WGQ | |
| | GTLVTVSSASTKGPSVFPLAPSSKSTSGGTAALGCLVK | |
| | DYFPEPVTVSWNSGALTSGVHTFPAVLQSSGLYSLSSV | |
| | VTVPSSSLGTQTYICNVNHKPSNTKVDKKVEPKSCDKT | |
| | HTCPPCPAPELLGGPSVFLFPPKPKDTLMISRTPEVTCV | |
| | VVDVSHEDPEVKFNWYVDGVEVHNAKTKPREEQYGS | |
| | TYRVVSVLTVLHQDWLNGKEYKCKVSNKALPAPIEKT | |
| | ISKAKGQPREPQVYTLPPSRDELTKNQVSLWCLVKGFY | |
| | PSDIAVEWESNGQPENNYKTTPPVLDSDGSFFLYSKLT | |
| | VDKSRWQQGNVFSCSVMHEALHNHYTQKSLSLSPG | |
| mAb2.4-HC | ELQLQESGPGLVKPSETLSLTCTVSGGSI [symbol] GWI | 217 |
| (hole) | RQPPGKGLEWIG [symbol] SLKSRVTISVDTSKN | |
| | QFSLKLSSVTAADTAVYYC [symbol] WGQ | |
| | GTLVTVSSASTKGPSVFPLAPSSKSTSGGTAALGCLVK | |
| | DYFPEPVTVSWNSGALTSGVHTFPAVLQSSGLYSLSSV | |
| | VTVPSSSLGTQTYICNVNHKPSNTKVDKKVEPKSCDKT | |
| | HTCPPCPAPELLGGPSVFLFPPKPKDTLMISRTPEVTCV | |
| | VVDVSHEDPEVKFNWYVDGVEVHNAKTKPREEQYGS | |
| | TYRVVSVLTVLHQDWLNGKEYKCKVSNKALPAPIEKT | |
| | ISKAKGQPREPQVYTLPPSRDELTKNQVSLSCAVKGFY | |
| | PSDIAVEWESNGQPENNYKTTPPVLDSDGSFFLVSKLT | |
| | VDKSRWQQGNVFSCSVMHEALHNHYTQKSLSLSPG | |
| mAb2.5-HC | ELQLQESGPGLVKPSETLSLTCTVSGGSI [symbol] GWI | 218 |
| | RQPPGKGLEWIG [symbol] SLKSRVTISVDTSKN | |
| | QFSLKLSSVTAADTAVYYC [symbol] WGQ | |
| | GTLVTVSSASTKGPSVFPLAPSSKSTSGGTAALGCLVK | |
| | DYFPEPVTVSWNSGALTSGVHTFPAVLQSSGLYSLSSV | |
| | VTVPSSSLGTQTYICNVNHKPSNTKVDKKVEPKSCDKT | |
| | HTCPPCPAPELLGGPSVFLFPPKPKDTLMISRTPEVTCV | |
| | VVDVSHEDPEVKFNWYVDGVEVHNAKTKPREEQYGS | |
| | TYRVVSVLTVLHQDWLNGKEYKCKVSNKALPAPIEKT | |
| | ISKAKGQPREPQVYTLPPSRDELTKNQVSLTCLVKGFY | |
| | PSDIAVEWESNGQPENNYKTTPPVLDSDGSFFLYSKLT | |
| | VDKSRWQQGNVFSCSVMHEALHNHYTQKSLSLSPG | |
| mAb2.5-HC | ELQLQESGPGLVKPSETLSLTCTVSGGSI [symbol] GWI | 219 |
| (knob) | RQPPGKGLEWIG [symbol] SLKSRVTISVDTSKN | |
| | QFSLKLSSVTAADTAVYYC [symbol] WGQ | |
| | GTLVTVSSASTKGPSVFPLAPSSKSTSGGTAALGCLVK | |
| | DYFPEPVTVSWNSGALTSGVHTFPAVLQSSGLYSLSSV | |
| | VTVPSSSLGTQTYICNVNHKPSNTKVDKKVEPKSCDKT | |
| | HTCPPCPAPELLGGPSVFLFPPKPKDTLMISRTPEVTCV | |
| | VVDVSHEDPEVKFNWYVDGVEVHNAKTKPREEQYGS | |
| | TYRVVSVLTVLHQDWLNGKEYKCKVSNKALPAPIEKT | |
| | ISKAKGQPREPQVYTLPPSRDELTKNQVSLWCLVKGFY | |
| | PSDIAVEWESNGQPENNYKTTPPVLDSDGSFFLYSKLT | |
| | VDKSRWQQGNVFSCSVMHEALHNHYTQKSLSLSPG | |
| mAb2.5-HC | ELQLQESGPGLVKPSETLSLTCTVSGGSI [symbol] GWI | 220 |
| (hole) | RQPPGKGLEWIG [symbol] SLKSRVTISVDTSKN | |
| | QFSLKLSSVTAADTAVYYC [symbol] WGQ | |
| | GTLVTVSSASTKGPSVFPLAPSSKSTSGGTAALGCLVK | |
| | DYFPEPVTVSWNSGALTSGVHTFPAVLQSSGLYSLSSV | |
| | VTVPSSSLGTQTYICNVNHKPSNTKVDKKVEPKSCDKT | |
| | HTCPPCPAPELLGGPSVFLFPPKPKDTLMISRTPEVTCV | |
| | VVDVSHEDPEVKFNWYVDGVEVHNAKTKPREEQYGS | |
| | TYRVVSVLTVLHQDWLNGKEYKCKVSNKALPAPIEKT | |
| | ISKAKGQPREPQVYTLPPSRDELTKNQVSLSCAVKGFY | |
| | PSDIAVEWESNGQPENNYKTTPPVLDSDGSFFLVSKLT | |
| | VDKSRWQQGNVFSCSVMHEALHNHYTQKSLSLSPG | |
| mAb2.6-HC | ELQLQESGPGLVKPSETLSLTCTVSGGSI [symbol] GWI | 221 |
| | RQPPGKGLEWIG [symbol] SLKSRVTISVDTSKN | |
| | QFSLKLSSVTAADTAVYYC [symbol] WGQ | |
| | GTLVTVSSASTKGPSVFPLAPSSKSTSGGTAALGCLVK | |
| | DYFPEPVTVSWNSGALTSGVHTFPAVLQSSGLYSLSSV | |
| | VTVPSSSLGTQTYICNVNHKPSNTKVDKKVEPKSCDKT | |
| | HTCPPCPAPELLGGPSVFLFPPKPKDTLMISRTPEVTCV | |
| | VVDVSHEDPEVKFNWYVDGVEVHNAKTKPREEQYGS | |
| | TYRVVSVLTVLHQDWLNGKEYKCKVSNKALPAPIEKT | |
| | ISKAKGQPREPQVYTLPPSRDELTKNQVSLTCLVKGFY | |
| | PSDIAVEWESNGQPENNYKTTPPVLDSDGSFFLYSKLT | |
| | VDKSRWQQGNVFSCSVMHEALHNHYTQKSLSLSPG | |
| mAb2.6-HC | ELQLQESGPGLVKPSETLSLTCTVSGGSI [symbol] GWI | 222 |
| (knob) | RQPPGKGLEWIG [symbol] SLKSRVTISVDTSKN | |
| | QFSLKLSSVTAADTAVYYC [symbol] WGQ | |
| | GTLVTVSSASTKGPSVFPLAPSSKSTSGGTAALGCLVK | |
| | DYFPEPVTVSWNSGALTSGVHTFPAVLQSSGLYSLSSV | |
| | VTVPSSSLGTQTYICNVNHKPSNTKVDKKVEPKSCDKT | |
| | HTCPPCPAPELLGGPSVFLFPPKPKDTLMISRTPEVTCV | |
| | VVDVSHEDPEVKFNWYVDGVEVHNAKTKPREEQYGS | |
| | TYRVVSVLTVLHQDWLNGKEYKCKVSNKALPAPIEKT | |
| | ISKAKGQPREPQVYTLPPSRDELTKNQVSLWCLVKGFY | |
| | PSDIAVEWESNGQPENNYKTTPPVLDSDGSFFLYSKLT | |
| | VDKSRWQQGNVFSCSVMHEALHNHYTQKSLSLSPG | |
| mAb2.6-HC | ELQLQESGPGLVKPSETLSLTCTVSGGSI [symbol] GWI | 223 |
| (hole) | RQPPGKGLEWIG [symbol] SLKSRVTISVDTSKN | |
| | QFSLKLSSVTAADTAVYYC [symbol] WGQ | |
| | GTLVTVSSASTKGPSVFPLAPSSKSTSGGTAALGCLVK | |
| | DYFPEPVTVSWNSGALTSGVHTFPAVLQSSGLYSLSSV | |
| | VTVPSSSLGTQTYICNVNHKPSNTKVDKKVEPKSCDKT | |
| | HTCPPCPAPELLGGPSVFLFPPKPKDTLMISRTPEVTCV | |
| | VVDVSHEDPEVKFNWYVDGVEVHNAKTKPREEQYGS | |
| | TYRVVSVLTVLHQDWLNGKEYKCKVSNKALPAPIEKT | |
| | ISKAKGQPREPQVYTLPPSRDELTKNQVSLSCAVKGFY | |
| | PSDIAVEWESNGQPENNYKTTPPVLDSDGSFFLVSKLT | |
| | VDKSRWQQGNVFSCSVMHEALHNHYTQKSLSLSPG | |
| mAb2.7-HC | ELQLQESGPGLVKPSETLSLTCTVSGGSI [symbol] GWI | 224 |
| | RQPPGKGLEWIG [symbol] SLKSRVTISVDTSKN | |
| | QFSLKLSSVTAADTAVYYC [symbol] WGQ | |
| | GTLVTVSSASTKGPSVFPLAPSSKSTSGGTAALGCLVK | |
| | DYFPEPVTVSWNSGALTSGVHTFPAVLQSSGLYSLSSV | |
| | VTVPSSSLGTQTYICNVNHKPSNTKVDKKVEPKSCDKT | |
| | HTCPPCPAPELLGGPSVFLFPPKPKDTLMISRTPEVTCV | |
| | VVDVSHEDPEVKFNWYVDGVEVHNAKTKPREEQYGS | |
| | TYRVVSVLTVLHQDWLNGKEYKCKVSNKALPAPIEKT | |
| | ISKAKGQPREPQVYTLPPSRDELTKNQVSLTCLVKGFY | |
| | PSDIAVEWESNGQPENNYKTTPPVLDSDGSFFLYSKLT | |
| | VDKSRWQQGNVFSCSVMHEALHNHYTQKSLSLSPG | |
| mAb2.7-HC | ELQLQESGPGLVKPSETLSLTCTVSGGSI [symbol] GWI | 225 |
| (knob) | RQPPGKGLEWIG [symbol] SLKSRVTISVDTSKN | |
| | QFSLKLSSVTAADTAVYYC [symbol] WGQ | |
| | GTLVTVSSASTKGPSVFPLAPSSKSTSGGTAALGCLVK | |
| | DYFPEPVTVSWNSGALTSGVHTFPAVLQSSGLYSLSSV | |
| | VTVPSSSLGTQTYICNVNHKPSNTKVDKKVEPKSCDKT | |
| | HTCPPCPAPELLGGPSVFLFPPKPKDTLMISRTPEVTCV | |
| | VVDVSHEDPEVKFNWYVDGVEVHNAKTKPREEQYGS | |
| | TYRVVSVLTVLHQDWLNGKEYKCKVSNKALPAPIEKT | |
| | ISKAKGQPREPQVYTLPPSRDELTKNQVSLWCLVKGFY | |
| | PSDIAVEWESNGQPENNYKTTPPVLDSDGSFFLYSKLT | |
| | VDKSRWQQGNVFSCSVMHEALHNHYTQKSLSLSPG | |
| mAb2.7-HC | ELQLQESGPGLVKPSETLSLTCTVSGGSI [symbol] GWI | 226 |
| (hole) | RQPPGKGLEWIG [symbol] SLKSRVTISVDTSKN | |
| | QFSLKLSSVTAADTANYYC [symbol] WGQ | |
| | GTLVTVSSASTKGPSVFPLAPSSKSTSGGTAALGCLVK | |
| | DYFPEPVTVSWNSGALTSGVHTFPAVLQSSGLYSLSSV | |
| | VTVPSSSLGTQTYICNVNHKPSNTKVDKKVEPKSCDKT | |
| | HTCPPCPAPELLGGPSVFLFPPKPKDTLMISRTPEVTCV | |
| | VVDVSHEDPEVKFNWYVDGVEVHNAKTKPREEQYGS | |
| | TYRVVSVLTVLHQDWLNGKEYKCKVSNKALPAPIEKT | |
| | ISKAKGQPREPQVYTLPPSRDELTKNQVSLSCAVKGFY | |
| | PSDIAVEWESNGQPENNYKTTPPVLDSDGSFFLVSKLT | |
| | VDKSRWQQGNVFSCSVMHEALHNHYTQKSLSLSPG | |
| mAb2.8-HC | ELQLQESGPGLVKPSETLSLTCTVSGGSI [symbol] GWI | 227 |
| | RQPPGKGLEWIG [symbol] SLKSRVTISVDTSKN | |
| | QFSLKLSSVTAADTAVYYC [symbol] WGQ | |
| | GTLVTVSSASTKGPSVFPLAPSSKSTSGGTAALGCLVK | |
| | DYFPEPVTVSWNSGALTSGVHTFPAVLQSSGLYSLSSV | |
| | VTVPSSSLGTQTYICNVNHKPSNTKVDKKVEPKSCDKT | |
| | HTCPPCPAPELLGGPSVFLFPPKPKDTLMISRTPEVTCV | |
| | VVDVSHEDPEVKFNWYVDGVEVHNAKTKPREEQYGS | |
| | TYRVVSVLTVLHQDWLNGKEYKCKVSNKALPAPIEKT | |
| | ISKAKGQPREPQVYTLPPSRDELTKNQVSLTCLVKGFY | |
| | PSDIAVEWESNGQPENNYKTTPPVLDSDGSFFLYSKLT | |
| | VDKSRWQQGNVFSCSVMHEALHNHYTQKSLSLSPG | |
| mAb2.8-HC | ELQLQESGPGLVKPSETLSLTCTVSGGSI [symbol] GWI | 228 |
| (knob) | RQPPGKGLEWIG [symbol] SLKSRVTISVDTSKN | |
| | QFSLKLSSVTAADTAVYYC [symbol] WGQ | |
| | GTLVTVSSASTKGPSVFPLAPSSKSTSGGTAALGCLVK | |
| | DYFPEPVTVSWNSGALTSGVHTFPAVLQSSGLYSLSSV | |
| | VTVPSSSLGTQTYICNVNHKPSNTKVDKKVEPKSCDKT | |
| | HTCPPCPAPELLGGPSVFLFPPKPKDTLMISRTPEVTCV | |
| | VVDVSHEDPEVKFNWYVDGVEVHNAKTKPREEQYGS | |
| | TYRVVSVLTVLHQDWLNGKEYKCKVSNKALPAPIEKT | |
| | ISKAKGQPREPQVYTLPPSRDELTKNQVSLWCLVKGFY | |
| | PSDIAVEWESNGQPENNYKTTPPVLDSDGSFFLYSKLT | |
| | VDKSRWQQGNVFSCSVMHEALHNHYTQKSLSLSPG | |
| mAb2.8-HC | ELQLQESGPGLVKPSETLSLTCTVSGGSI [symbol] GWI | 229 |
| (hole) | RQPPGKGLEWIG [symbol] SLKSRVTISVDTSKN | |
| | QFSLKLSSVTAADTAVYYC [symbol] WGQ | |
| | GTLVTVSSASTKGPSVFPLAPSSKSTSGGTAALGCLVK | |
| | DYFPEPVTVSWNSGALTSGVHTFPAVLQSSGLYSLSSV | |
| | VTVPSSSLGTQTYICNVNHKPSNTKVDKKVEPKSCDKT | |
| | HTCPPCPAPELLGGPSVFLFPPKPKDTLMISRTPEVTCV | |
| | VVDVSHEDPEVKFNWYVDGVEVHNAKTKPREEQYGS | |
| | TYRVVSVLTVLHQDWLNGKEYKCKVSNKALPAPIEKT | |
| | ISKAKGQPREPQVYTLPPSRDELTKNQVSLSCAVKGFY | |
| | PSDIAVEWESNGQPENNYKTTPPVLDSDGSFFLVSKLT | |
| | VDKSRWQQGNVFSCSVMHEALHNHYTQKSLSLSPG | |
| mAb2.9-HC | ELQLQESGPGLVKPSETLSLTCTVSGGSI [symbol] GWI | 230 |
| | RQPPGKGLEWIG [symbol] SLKSRVTISVDTSKN | |
| | QFSLKLSSNYAADYANAAC [symbol] WGQ | |
| | GTLVTVSSASTKGPSVFPLAPSSKSTSGGTAALGCLVK | |
| | DYFPEPVTVSWNSGALTSGVHTFPAVLQSSGLYSLSSV | |
| | VTVPSSSLGTQTYICNVNHKPSNTKVDKKVEPKSCDKT | |
| | HTCPPCPAPELLGGPSVFLFPPKPKDTLMISRTPEVTCV | |
| | VVDVSHEDPEVKFNWYVDGVEVHNAKTKPREEQYGS | |
| | TYRVVSVLTVLHQDWLNGKEYKCKVSNKALPAPIEKT | |
| | ISKAKGQPREPQVYTLPPSRDELTKNQVSLTCLVKGFY | |
| | PSDIAVEWESNGQPENNYKTTPPVLDSDGSFFLYSKLT | |
| | VDKSRWQQGNVFSCSVMHEALHNHYTQKSLSLSPG | |
| mAb2.9-HC | ELQLQESGPGLVKPSETLSLTCTVSGGSI [symbol] GWI | 231 |
| (knob) | RQPPGKGLEWIG [symbol] SLKSRVTISVDTSKN | |
| | QFSLKLSSVTAADTAVYYC [symbol] WGQ | |
| | GTLVTVSSASTKGPSVFPLAPSSKSTSGGTAALGCLVK | |
| | DYFPEPVTVSWNSGALTSGVHTFPAVLQSSGLYSLSSV | |
| | VTVPSSSLGTQTYICNVNHKPSNTKVDKKVEPKSCDKT | |
| | HTCPPCPAPELLGGPSVFLFPPKPKDTLMISRTPEVTCV | |
| | VVDVSHEDPEVKFNWYVDGVEVHNAKTKPREEQYGS | |
| | TYRVVSVLTVLHQDWLNGKEYKCKVSNKALPAPIEKT | |
| | ISKAKGQPREPQVYTLPPSRDELTKNQVSLWCLVKGFY | |
| | PSDIAVEWESNGQPENNYKTTPPVLDSDGSFFLYSKLT | |
| | VDKSRWQQGNVFSCSVMHEALHNHYTQKSLSLSPG | |
| mAb2.9-HC | ELQLQESGPGLVKPSETLSLTCTVSGGSI [symbol] GWI | 232 |
| (hole) | RQPPGKGLEWIG [symbol] SLKSRVTISVDTSKN | |
| | QFSLKLSSVTAADTAVYYC [symbol] WGQ | |
| | GTLVTVSSASTKGPSVFPLAPSSKSTSGGTAALGCLVK | |
| | DYFPEPVTVSWNSGALTSGVHTFPAVLQSSGLYSLSSV | |
| | VTVPSSSLGTQTYICNVNHKPSNTKVDKKVEPKSCDKT | |
| | HTCPPCPAPELLGGPSVFLFPPKPKDTLMISRTPEVTCV | |
| | VVDVSHEDPEVKFNWYVDGVEVHNAKTKPREEQYGS | |
| | TYRVVSVLTVLHQDWLNGKEYKCKVSNKALPAPIEKT | |
| | ISKAKGQPREPQVYTLPPSRDELTKNQVSLSCAVKGFY | |
| | PSDIAVEWESNGQPENNYKTTPPVLDSDGSFFLVSKLT | |
| | VDKSRWQQGNVFSCSVMHEALHNHYTQKSLSLSPG | |
| mAb2.10-HC | ELQLQESGPGLVKPSETLSLTCTVSGGSI [symbol] GWI | 233 |
| | RQPPGKGLEWIG [symbol] SLKSRVTISVDTSKN | |
| | QFSLKLSSVTAADTAVYYC [symbol] PWG | |
| | QGTLVTVSSASTKGPSVFPLAPSSKSTSGGTAALGCLV | |
| | KDYFPEPVTVSWNSGALTSGVHTFPAVLQSSGLYSLSS | |
| | VVTVPSSSLGTQTYICNVNHKPSNTKVDKKVEPKSCD | |
| | KTHTCPPCPAPELLGGPSVFLFPPKPKDTLMISRTPEVT | |
| | CVVVDVSHEDPEVKFNWYVDGVEVHNAKTKPREEQY | |
| | GSTYRVVSVLTVLHQDWLNGKEYKCKVSNKALPAPIE | |
| | KTISKAKGQPREPQVYTLPPSRDELTKNQVSLTCLVKG | |
| | FYPSDIAVEWESNGQPENNYKTTPPVLDSDGSFFLYSK | |
| | LTVDKSRWQQGNVFSCSVMHEALHNHYTQKSLSLSPG | |
| mAb2.10-HC | ELQLQESGPGLVKPSETLSLTCTVSGGSI [symbol] GWI | 234 |
| (knob) | RQPPGKGLEWIG [symbol] SLKSRVTISVDTSKN | |
| | QFSLKLSSVYAADYAVAAC [symbol] WG | |
| | QGTLVTVSSASTKGPSVFPLAPSSKSTSGGTAALGCLV | |
| | KDYFPEPVTVSWNSGALTSGVHTFPAVLQSSGLYSLSS | |
| | VVTVPSSSLGTQTYICNVNHKPSNTKVDKKVEPKSCD | |
| | KTHTCPPCPAPELLGGPSVFLFPPKPKDTLMISRTPEVT | |
| | CVVVDVSHEDPEVKFNWYVDGVEVHNAKTKPREEQY | |
| | GSTYRVVSVLTVLHQDWLNGKEYKCKVSNKALPAPIE | |
| | KTISKAKGQPREPQVYTLPPSRDELTKNQVSLWCLVK | |
| | GFYPSDIAVEWESNGQPENNYKTTPPVLDSDGSFFLYS | |
| | KLTVDKSRWQQGNVFSCSVMHEALHNHYTQKSLSLSP | |
| | G | |
| mAb2.10-HC | ELQLQESGPGLVKPSETLSLTCTVSGGSI [symbol] GWI | 235 |
| (hole) | RQPPGKGLEWIG [symbol] SLKSRVTISVDTSKN | |
| | QFSLKLSSNYAADYANAAC [symbol] WG | |
| | QGTLVTVSSASTKGPSVFPLAPSSKSTSGGTAALGCLV | |
| | KDYFPEPVTVSWNSGALTSGVHTFPAVLQSSGLYSLSS | |
| | VVTVPSSSLGTQTYICNVNHKPSNTKVDKKVEPKSCD | |
| | KTHTCPPCPAPELLGGPSVFLFPPKPKDTLMISRTPEVT | |
| | CVVVDVSHEDPEVKFNWYVDGVEVHNAKTKPREEQY | |
| | GSTYRVVSVLTVLHQDWLNGKEYKCKVSNKALPAPIE | |
| | KTISKAKGQPREPQVYTLPPSRDELTKNQVSLSCAVKG | |
| | FYPSDIAVEWESNGQPENNYKTTPPVLDSDGSFFLVSK | |
| | LTVDKSRWQQGNVFSCSVMHEALHNHYTQKSLSLSPG | |
| mAb2.11-HC | ELQLQESGPGLVKPSETLSLTCTVSGGSI [symbol] GWI | 236 |
| | RQPPGKGLEWIG [symbol] SLKSRVTISVDTSKN | |
| | QFSLKLSSVTAADTAVAAC [symbol] WGQ | |
| | GTLVTVSSASTKGPSVFPLAPSSKSTSGGTAALGCLVK | |
| | DYFPEPVTVSWNSGALTSGVHTFPAVLQSSGLYSLSSV | |
| | VTVPSSSLGTQTYICNVNHKPSNTKVDKKVEPKSCDKT | |
| | HTCPPCPAPELLGGPSVFLFPPKPKDTLMISRTPEVTCV | |
| | VVDVSHEDPEVKFNWYVDGVEVHNAKTKPREEQYGS | |
| | TYRVVSVLTVLHQDWLNGKEYKCKVSNKALPAPIEKT | |
| | ISKAKGQPREPQVYTLPPSRDELTKNQVSLTCLVKGFY | |
| | PSDIAVEWESNGQPENNYKTTPPVLDSDGSFFLYSKLT | |
| | VDKSRWQQGNVFSCSVMHEALHNHYTQKSLSLSPG | |
| mAb2.11-HC | ELQLQESGPGLVKPSETLSLTCTVSGGSI [symbol] GWI | 237 |
| (knob) | RQPPGKGLEWIG [symbol] SLKSRVTISVDTSKN | |
| | QFSLKLSSVTAADTAVYYC [symbol] WGQ | |
| | GTLVTVSSASTKGPSVFPLAPSSKSTSGGTAALGCLVK | |
| | DYFPEPVTVSWNSGALTSGVHTFPAVLQSSGLYSLSSV | |
| | VTVPSSSLGTQTYICNVNHKPSNTKVDKKVEPKSCDKT | |
| | HTCPPCPAPELLGGPSVFLFPPKPKDTLMISRTPEVTCV | |
| | VVDVSHEDPEVKFNWYVDGVEVHNAKTKPREEQYGS | |
| | TYRVVSVLTVLHQDWLNGKEYKCKVSNKALPAPIEKT | |
| | ISKAKGQPREPQVYTLPPSRDELTKNQVSLWCLVKGFY | |
| | PSDIAVEWESNGQPENNYKTTPPVLDSDGSFFLYSKLT | |
| | VDKSRWQQGNVFSCSVMHEALHNHYTQKSLSLSPG | |
| mAb2.11-HC | ELQLQESGPGLVKPSETLSLTCTVSGGSI [symbol] GWI | 238 |
| (hole) | RQPPGKGLEWIG [symbol] SLKSRVTISVDTSKN | |
| | QFSLKLSSVTAADTAVYYC [symbol] WGQ | |
| | GTLVTVSSASTKGPSVFPLAPSSKSTSGGTAALGCLVK | |
| | DYFPEPVTVSWNSGALTSGVHTFPAVLQSSGLYSLSSV | |
| | VTVPSSSLGTQTYICNVNHKPSNTKVDKKVEPKSCDKT | |
| | HTCPPCPAPELLGGPSVFLFPPKPKDTLMISRTPEVTCV | |
| | VVDVSHEDPEVKFNWYVDGVEVHNAKTKPREEQYGS | |
| | TYRVVSVLTVLHQDWLNGKEYKCKVSNKALPAPIEKT | |
| | ISKAKGQPREPQVYTLPPSRDELTKNQVSLSCAVKGFY | |
| | PSDIAVEWESNGQPENNYKTTPPVLDSDGSFFLVSKLT | |
| | VDKSRWQQGNVFSCSVMHEALHNHYTQKSLSLSPG | |
| mAb2.12-HC | ELQLQESGPGLVKPSETLSLTCTVSGGSI [symbol] GWI | 239 |
| | RQPPGKGLEWIG [symbol] SLKSRVTISVDTSKN | |
| | QFSLKLSSNYAADYANAAC [symbol] WGQ | |
| | GTLVTVSSASTKGPSVFPLAPSSKSTSGGTAALGCLVK | |
| | DYFPEPVTVSWNSGALTSGVHTFPAVLQSSGLYSLSSV | |
| | VTVPSSSLGTQTYICNVNHKPSNTKVDKKVEPKSCDKT | |
| | HTCPPCPAPELLGGPSVFLFPPKPKDTLMISRTPEVTCV | |
| | VVDVSHEDPEVKFNWYVDGVEVHNAKTKPREEQYGS | |
| | TYRVVSVLTVLHQDWLNGKEYKCKVSNKALPAPIEKT | |
| | ISKAKGQPREPQVYTLPPSRDELTKNQVSLTCLVKGFY | |
| | PSDIAVEWESNGQPENNYKTTPPVLDSDGSFFLYSKLT | |
| | VDKSRWQQGNVFSCSVMHEALHNHYTQKSLSLSPG | |
| mAb2.12-HC | ELQLQESGPGLVKPSETLSLTCTVSGGSI [symbol] GWI | 240 |
| (knob) | RQPPGKGLEWIG [symbol] SLKSRVTISVDTSKN | |
| | QFSLKLSSVTAADTAVYYC [symbol] WGQ | |
| | GTLVTVSSASTKGPSVFPLAPSSKSTSGGTAALGCLVK | |
| | DYFPEPVTVSWNSGALTSGVHTFPAVLQSSGLYSLSSV | |
| | VTVPSSSLGTQTYICNVNHKPSNTKVDKKVEPKSCDKT | |
| | HTCPPCPAPELLGGPSVFLFPPKPKDTLMISRTPEVTCV | |
| | VVDVSHEDPEVKFNWYVDGVEVHNAKTKPREEQYGS | |
| | TYRVVSVLTVLHQDWLNGKEYKCKVSNKALPAPIEKT | |
| | ISKAKGQPREPQVYTLPPSRDELTKNQVSLWCLVKGFY | |
| | PSDIAVEWESNGQPENNYKTTPPVLDSDGSFFLYSKLT | |
| | VDKSRWQQGNVFSCSVMHEALHNHYTQKSLSLSPG | |
| mAb2.12-HC | ELQLQESGPGLVKPSETLSLTCTVSGGSI [symbol] GWI | 241 |
| (hole) | RQPPGKGLEWIG [symbol] SLKSRVTISVDTSKN | |
| | QFSLKLSSVTAADTAVYYC [symbol] WGQ | |
| | GTLVTVSSASTKGPSVFPLAPSSKSTSGGTAALGCLVK | |
| | DYFPEPVTVSWNSGALTSGVHTFPAVLQSSGLYSLSSV | |
| | VTVPSSSLGTQTYICNVNHKPSNTKVDKKVEPKSCDKT | |
| | HTCPPCPAPELLGGPSVFLFPPKPKDTLMISRTPEVTCV | |
| | VVDVSHEDPEVKFNWYVDGVEVHNAKTKPREEQYGS | |
| | TYRVVSVLTVLHQDWLNGKEYKCKVSNKALPAPIEKT | |
| | ISKAKGQPREPQVYTLPPSRDELTKNQVSLSCAVKGFY | |
| | PSDIAVEWESNGQPENNYKTTPPVLDSDGSFFLVSKLT | |
| | VDKSRWQQGNVFSCSVMHEALHNHYTQKSLSLSPG | |
| mAb6_2-HVR- | XXXNXYX | 251 |
| H1-generic | X at position 1 is T, D, E, or N; | |
| | X at position 2 is S, A, E, G, K, Q, | |
| | R, or T; | |
| | X at position 3 is S, A, D, E, G, N, | |
| | P, Q, or T; | |
| | X at position 5 is Y, A, E, G, H, M, | |
| | N, Q, S, T, or V; | |
| | X at position 7 is W, F, I, V, or Y. | |
| mAb6_2-HVR- | DSSNYYW | 252 |
| H1-T30D | | |
| mAb6_2-HVR- | ESSNYYW | 253 |
| H1-T30E | | |
| mAb6_2-HVR- | NSSNYYW | 254 |
| H1-T30N | | |
| mAb6_2-HVR- | TASNYYW | 255 |
| H1-S31A | | |
| mAb6_2-HVR- | TESNYYW | 256 |
| H1-S31E | | |
| mAb6_2-HVR- | TGSNYYW | 257 |
| H1-S31G | | |
| mAb6_2-HVR- | TKSNYYW | 258 |
| H1-S31K | | |
| mAb6_2-HVR- | TQSNYYW | 259 |
| H1-S31Q | | |
| mAb6_2-HVR- | TRSNYYW | 260 |
| H1-S31R | | |
| mAb6_2-HVR- | TTSNYYW | 261 |
| H1-S31T | | |
| mAb6_2-HVR- | TSANYYW | 262 |
| H1-S32A | | |
| mAb6_2-HVR- | TSDNYYW | 263 |
| H1-S32D | | |
| mAb6_2-HVR- | TSENYYW | 264 |
| H1-S32E | | |
| mAb6_2-HVR- | TSGNYYW | 265 |
| H1-S32G | | |
| mAb6_2-HVR- | TSNNYYW | 266 |
| H1-S32N | | |
| mAb6_2-HVR- | TSPNYYW | 267 |
| H1-S32P | | |
| mAb6_2-HVR- | TSQNYYW | 268 |
| H1-S32Q | | |
| mAb6_2-HVR- | TSTNYYW | 269 |
| H1-S32T | | |
| mAb6_2-HVR- | TSSNAYW | 270 |
| H1-Y34A | | |
| mAb6_2-HVR- | TSSNEYW | 271 |
| H1-Y34E | | |
| mAb6_2-HVR- | TSSNGYW | 272 |
| H1-Y34G | | |
| mAb6_2-HVR- | TSSNHYW | 273 |
| H1-Y34H | | |
| mAb6_2-HVR- | TSSNMYW | 274 |
| H1-Y34M | | |
| mAb6_2-HVR- | TSSNNYW | 275 |
| H1-Y34N | | |
| mAb6_2-HVR- | TSSNQYW | 276 |
| H1-Y34Q | | |
| mAb6_2-HVR- | TSSNSYW | 277 |
| H1-Y34S | | |
| mAb6_2-HVR- | TSSNTYW | 278 |
| H1-Y34T | | |
| mAb6_2-HVR- | TSSNVYW | 279 |
| H1-Y34V | | |
| mAb6_2-HVR- | TSSNYYF | 280 |
| H1-W35aF | | |
| mAb6_2-HVR- | TSSNYYI | 281 |
| H1-W35aI | | |
| mAb6_2-HVR- | TSSNYYV | 282 |
| H1-W35aV | | |
| mAb6_2-HVR- | TSSNYYY | 283 |
| H1-W35aY | | |
| mAb6_2-HVR- | XXDXXXXXXYXX | 284 |
| H2-generic | X at position 1 is S, N, or T; | |
| | X at position 2 is I, M, or V; | |
| | X at position 4 is Y, or H; | |
| | X at position 5 is T, H, L, or N; | |
| | X at position 6 is G, A, D, E, H, K, | |
| | N, Q, R, S, or T; | |
| | X at position 7 is S, A, D, Q, or T; | |
| | X at position 8 is T, A, D, or E; | |
| | X at position 9 is Y, A, F, Q, S, | |
| | or W; | |
| | X at position 11 is N, D, E, H, P, | |
| | or Q; | |
| | X at position 12 is P, A, or E. | |
| mAb6_2-HVR- | NIDYTGSTYYNP | 285 |
| H2-S50N | | |
| mAb6_2-HVR- | TIDYTGSTYYNP | 286 |
| H2-S50T | | |
| mAb6_2-HVR- | SMDYTGSTYYNP | 287 |
| H2-I51M | | |
| mAb6_2-HVR- | SVDYTGSTYYNP | 288 |
| H2-I51V | | |
| mAb6_2-HVR- | SIDHTGSTYYNP | 289 |
| H2-Y53H | | |
| mAb6_2-HVR- | SIDYHGSTYYNP | 290 |
| H2-T54H | | |
| mAb6_2-HVR- | SIDYLGSTYYNP | 291 |
| H2-T54L | | |
| mAb6_2-HVR- | SIDYNGSTYYNP | 292 |
| H2-T54N | | |
| mAb6_2-HVR- | SIDYTASTYYNP | 293 |
| H2-G55A | | |
| mAb6_2-HVR- | SIDYTDSTYYNP | 294 |
| H2-G55D | | |
| mAb6_2-HVR- | SIDYTESTYYNP | 295 |
| H2-G55E | | |
| mAb6_2-HVR- | SIDYTHSTYYNP | 296 |
| H2-G55H | | |
| mAb6_2-HVR- | SIDYTKSTYYNP | 297 |
| H2-G55K | | |
| mAb6_2-HVR- | SIDYTNSTYYNP | 298 |
| H2-G55N | | |
| mAb6_2-HVR- | SIDYTQSTYYNP | 299 |
| H2-G55Q | | |
| mAb6_2-HVR- | SIDYTRSTYYNP | 300 |
| H2-G55R | | |
| mAb6_2-HVR- | SIDYTSSTYYNP | 301 |
| H2-G55S | | |
| mAb6_2-HVR- | SIDYTTSTYYNP | 302 |
| H2-G55T | | |
| mAb6_2-HVR- | SIDYTGATYYNP | 303 |
| H2-S56A | | |
| mAb6_2-HVR- | SIDYTGDTYYNP | 304 |
| H2-S56D | | |
| mAb6_2-HVR- | SIDYTGQTYYNP | 305 |
| H2-S56Q | | |
| mAb6_2-HVR- | SIDYTGTTYYNP | 306 |
| H2-S56T | | |
| mAb6_2-HVR- | SIDYTGSAYYNP | 307 |
| H2-T57A | | |
| mAb6_2-HVR- | SIDYTGSDYYNP | 308 |
| H2-T57D | | |
| mAb6_2-HVR- | SIDYTGSEYYNP | 309 |
| H2-T57E | | |
| mAb6_2-HVR- | SIDYTGSTAYNP | 310 |
| H2-Y58A | | |
| mAb6_2-HVR- | SIDYTGSTFYNP | 311 |
| H2-Y58F | | |
| mAb6_2-HVR- | SIDYTGSTQYNP | 312 |
| H2-Y58Q | | |
| mAb6_2-HVR- | SIDYTGSTSYNP | 313 |
| H2-Y58S | | |
| mAb6_2-HVR- | SIDYTGSTWYNP | 314 |
| H2-Y58W | | |
| mAb6_2-HVR- | SIDYTGSTYYDP | 315 |
| H2-N60D | | |
| mAb6_2-HVR- | SIDYTGSTYYEP | 316 |
| H2-N60E | | |
| mAb6_2-HVR- | SIDYTGSTYYHP | 317 |
| H2-N60H | | |
| mAb6_2-HVR- | SIDYTGSTYYPP | 318 |
| H2-N60P | | |
| mAb6_2-HVR- | SIDYTGSTYYQP | 319 |
| H2-N60Q | | |
| mAb6_2-HVR- | SIDYTGSTYYNA | 320 |
| H2-P61A | | |
| mAb6_2-HVR- | SIDYTGSTYYNE | 321 |
| H2-P61E | | |
| mAb6_2-HVR- | AXGXYYXTYLGFDV | 322 |
| H3-generic | X at position 2 is R, A, E, G, H, M, | |
| | N, Q, S, T, or Y; | |
| | X at position 4 is K, A, or S; | |
| | X at position 7 is E or T. | |
| mAb6_2-HVR- | AAGKYYETYLGFDV | 323 |
| H3-R94A | | |
| mAb6_2-HVR- | AEGKYYETYLGFDV | 324 |
| H3-R94E | | |
| mAb6_2-HVR- | AGGKYYETYLGFDV | 325 |
| H3-R94G | | |
| mAb6_2-HVR- | AHGKYYETYLGFDV | 326 |
| H3-R94H | | |
| mAb6_2-HVR- | AMGKYYETYLGFDV | 327 |
| H3-R94M | | |
| mAb6_2-HVR- | ANGKYYETYLGFDV | 328 |
| H3-R94N | | |
| mAb6_2-HVR- | AQGKYYETYLGFDV | 329 |
| H3-R94Q | | |
| mAb6_2-HVR- | ASGKYYETYLGFDV | 330 |
| H3-R94S | | |
| mAb6_2-HVR- | ATGKYYETYLGFDV | 331 |
| H3-R94T | | |
| mAb6_2-HVR- | AYGKYYETYLGFDV | 332 |
| H3-R94Y | | |
| mAb6_2-HVR- | ARGAYYETYLGFDV | 333 |
| H3-K96A | | |
| mAb6_2-HVR- | ARGSYYETYLGFDV | 334 |
| H3-K96S | | |
| mAb6_2-HVR- | ARGKYYTTYLGFDV | 335 |
| H3-E99T | | |
| mAb2-HVR- | XXXXXXW | 336 |
| H1-generic | X at position 1 is S or D; | |
| | X at position 2 is T, A, D, E, G, H, | |
| | K, N, P, Q, R, or S; | |
| | X at position 3 is S, D, E, G, K, N, | |
| | P, or R; | |
| | X at position 4 is S, G, K, N, or P; | |
| | X at position 5 is Y, A, D, E, G, H, | |
| | M, N, Q, S, T, V, or W; | |
| | X at position 6 is Y, A, F, G, H, M, | |
| | N, or Q. | |
| mAb2-HVR- | DTSSYYW | 337 |
| H1-S30D | | |
| mAb2-HVR- | SASSYYW | 338 |
| H1-T31A | | |
| mAb2-HVR- | SDSSYYW | 339 |
| H1-T31D | | |
| mAb2-HVR- | SESSYYW | 340 |
| H1-T31E | | |
| mAb2-HVR- | SGSSYYW | 341 |
| H1-T31G | | |
| mAb2-HVR- | SHSSYYW | 342 |
| H1-T31H | | |
| mAb2-HVR- | SKSSYYW | 343 |
| H1-T31K | | |
| mAb2-HVR- | SNSSYYW | 344 |
| H1-T31N | | |
| mAb2-HVR- | SPSSYYW | 345 |
| H1-T31P | | |
| mAb2-HVR- | SQSSYYW | 346 |
| H1-T31Q | | |
| mAb2-HVR- | SRSSYYW | 347 |
| H1-T31R | | |
| mAb2-HVR- | SSSSYYW | 348 |
| H1-T31S | | |
| mAb2-HVR- | STDSYYW | 349 |
| H1-S32D | | |
| mAb2-HVR- | STESYYW | 350 |
| H1-S32E | | |
| mAb2-HVR- | STGSYYW | 351 |
| H1-S32G | | |
| mAb2-HVR- | STKSYYW | 352 |
| H1-S32K | | |
| mAb2-HVR- | STNSYYW | 353 |
| H1-S32N | | |
| mAb2-HVR- | STPSYYW | 354 |
| H1-S32P | | |
| mAb2-HVR- | STRSYYW | 355 |
| H1-S32R | | |
| mAb2-HVR- | STSGYYW | 356 |
| H1-S33G | | |
| mAb2-HVR- | STSKYYW | 357 |
| H1-S33K | | |
| mAb2-HVR- | STSNYYW | 358 |
| H1-S33N | | |
| mAb2-HVR- | STSPYYW | 359 |
| H1-S33P | | |
| mAb2-HVR- | STSSAYW | 360 |
| H1-Y34A | | |
| mAb2-HVR- | STSSDYW | 361 |
| H1-Y34D | | |
| mAb2-HVR- | STSSEYW | 362 |
| H1-Y34E | | |
| mAb2-HVR- | STSSGYW | 363 |
| H1-Y34G | | |
| mAb2-HVR- | STSSHYW | 364 |
| H1-Y34H | | |
| mAb2-HVR- | STSSMYW | 365 |
| H1-Y34M | | |
| mAb2-HVR- | STSSNYW | 366 |
| H1-Y34N | | |
| mAb2-HVR- | STSSQYW | 367 |
| H1-Y34Q | | |
| mAb2-HVR- | STSSSYW | 368 |
| H1-Y34S | | |
| mAb2-HVR- | STSSTYW | 369 |
| H1-Y34T | | |
| mAb2-HVR- | STSSVYW | 370 |
| H1-Y34V | | |
| mAb2-HVR- | STSSWYW | 371 |
| H1-Y34W | | |
| mAb2-HVR- | STSSYAW | 372 |
| H1-Y35A | | |
| mAb2-HVR- | STSSYFW | 373 |
| H1-Y35F | | |
| mAb2-HVR- | STSSYGW | 374 |
| H1-Y35G | | |
| mAb2-HVR- | STSSYHW | 375 |
| H1-Y35H | | |
| mAb2-HVR- | STSSYMW | 376 |
| H1-Y35M | | |
| mAb2-HVR- | STSSYNW | 377 |
| H1-Y35N | | |
| mAb2-HVR- | STSSYQW | 378 |
| H1-Y35Q | | |
| mAb2-HVR- | XXXXXXXXXYXP | 379 |
| H2-generic | X at position 1 is S, F, I, M, or Q; | |
| | X at position 2 is I, A, G, L, R, S, | |
| | T, or V; | |
| | X at position 3 is Y, A, D, E, F, G, | |
| | H, K, L, M, N, P, Q, R, S, T, or W; | |
| | X at position 4 is Y, A, D, E, F, G, | |
| | H, K, N, P, Q, R, S, T, or W; | |
| | X at position 5 is T, D, E, K, N, P, | |
| | or Q; | |
| | X at position 6 is G or Q; | |
| | X at position 7 is N, D, E, G, H, I, | |
| | K, M, P, R, or S; | |
| | X at position 8 is T, A, E, F, G, H, | |
| | K, P, Q, R, S, V, W, or Y; | |
| | X at position 9 is Y or W; | |
| | X at position 11 is N, A, D, E, K, L, | |
| | M, P, Q, S or T. | |
| mAb2-HVR- | FIYYTGNTYYNP | 380 |
| H2-S50F | | |
| mAb2-HVR- | IIYYTGNTYYNP | 381 |
| H2-S50I | | |
| mAb2-HVR- | MIYYTGNTYYNP | 382 |
| H2-S50M | | |
| mAb2-HVR- | QIYYTGNTYYNP | 383 |
| H2-S50Q | | |
| mAb2-HVR- | SAYYTGNTYYNP | 384 |
| H2-I51A | | |
| mAb2-HVR- | SGYYTGNTYYNP | 385 |
| H2-I51G | | |
| mAb2-HVR- | SLYYTGNTYYNP | 386 |
| H2-I51L | | |
| mAb2-HVR- | SRYYTGNTYYNP | 387 |
| H2-I51R | | |
| mAb2-HVR- | SSYYTGNTYYNP | 388 |
| H2-I51S | | |
| mAb2-HVR- | STYYTGNTYYNP | 389 |
| H2-I51T | | |
| mAb2-HVR- | SVYYTGNTYYNP | 390 |
| H2-I51V | | |
| mAb2-HVR- | SIAYTGNTYYNP | 391 |
| H2-Y52A | | |
| mAb2-HVR- | SIDYTGNTYYNP | 392 |
| H2-Y52D | | |
| mAb2-HVR- | SIEYTGNTYYNP | 393 |
| H2-Y52E | | |
| mAb2-HVR- | SIFYTGNTYYNP | 394 |
| H2-Y52F | | |
| mAb2-HVR- | SIGYTGNTYYNP | 395 |
| H2-Y52G | | |
| mAb2-HVR- | SIHYTGNTYYNP | 396 |
| H2-Y52H | | |
| mAb2-HVR- | SIKYTGNTYYNP | 397 |
| H2-Y52K | | |
| mAb2-HVR- | SILYTGNTYYNP | 398 |
| H2-Y52L | | |
| mAb2-HVR- | SIMYTGNTYYNP | 399 |
| H2-Y52M | | |
| mAb2-HVR- | SINYTGNTYYNP | 400 |
| H2-Y52N | | |
| mAb2-HVR- | SIPYTGNTYYNP | 401 |
| H2-Y52P | | |
| mAb2-HVR- | SIQYTGNTYYNP | 402 |
| H2-Y52Q | | |
| mAb2-HVR- | SIRYTGNTYYNP | 403 |
| H2-Y52R | | |
| mAb2-HVR- | SISYTGNTYYNP | 404 |
| H2-Y52S | | |
| mAb2-HVR- | SITYTGNTYYNP | 405 |
| H2-Y52T | | |
| mAb2-HVR- | SIWYTGNTYYNP | 406 |
| H2-Y52W | | |
| mAb2-HVR- | SIYATGNTYYNP | 407 |
| H2-Y53A | | |
| mAb2-HVR- | SIYDTGNTYYNP | 408 |
| H2-Y53D | | |
| mAb2-HVR- | SIYETGNTYYNP | 409 |
| H2-Y53E | | |
| mAb2-HVR- | SIYFTGNTYYNP | 410 |
| H2-Y53F | | |
| mAb2-HVR- | SIYGTGNTYYNP | 411 |
| H2-Y53G | | |
| mAb2-HVR- | SIYHTGNTYYNP | 412 |
| H2-Y53H | | |
| mAb2-HVR- | SIYKTGNTYYNP | 413 |
| H2-Y53K | | |
| mAb2-HVR- | SIYNTGNTYYNP | 414 |
| H2-Y53N | | |
| mAb2-HVR- | SIYPTGNTYYNP | 415 |
| H2-Y53P | | |
| mAb2-HVR- | SIYQTGNTYYNP | 416 |
| H2-Y53Q | | |
| mAb2-HVR- | SIYRTGNTYYNP | 417 |
| H2-Y53R | | |
| mAb2-HVR- | SIYSTGNTYYNP | 418 |
| H2-Y53S | | |
| mAb2-HVR- | SIYTTGNTYYNP | 419 |
| H2-Y53T | | |
| mAb2-HVR- | SIYWTGNTYYNP | 420 |
| H2-Y53W | | |
| mAb2-HVR- | SIYYDGNTYYNP | 421 |
| H2-T54D | | |
| mAb2-HVR- | SIYYEGNTYYNP | 422 |
| H2-T54E | | |
| mAb2-HVR- | SIYYKGNTYYNP | 423 |
| H2-T54K | | |
| mAb2-HVR- | SIYYNGNTYYNP | 424 |
| H2-T54N | | |
| mAb2-HVR- | SIYYPGNTYYNP | 425 |
| H2-T54P | | |
| mAb2-HVR- | SIYYQGNTYYNP | 426 |
| H2-T54Q | | |
| mAb2-HVR- | SIYYTQNTYYNP | 427 |
| H2-G55Q | | |
| mAb2-HVR- | SIYYTGDTYYNP | 428 |
| H2-N56D | | |
| mAb2-HVR- | SIYYTGETYYNP | 429 |
| H2-N56E | | |
| mAb2-HVR- | SIYYTGGTYYNP | 430 |
| H2-N56G | | |
| mAb2-HVR- | SIYYTGHTYYNP | 431 |
| H2-N56H | | |
| mAb2-HVR- | SIYYTGITYYNP | 432 |
| H2-N56I | | |
| mAb2-HVR- | SIYYTGKTYYNP | 433 |
| H2-N56K | | |
| mAb2-HVR- | SIYYTGMTYYNP | 434 |
| H2-N56M | | |
| mAb2-HVR- | SIYYTGPTYYNP | 435 |
| H2-N56P | | |
| mAb2-HVR- | SIYYTGRTYYNP | 436 |
| H2-N56R | | |
| mAb2-HVR- | SIYYTGSTYYNP | 437 |
| H2-N56S | | |
| mAb2-HVR- | SIYYTGNAYYNP | 438 |
| H2-T57A | | |
| mAb2-HVR- | SIYYTGNEYYNP | 439 |
| H2-T57E | | |
| mAb2-HVR- | SIYYTGNFYYNP | 440 |
| H2-T57F | | |
| mAb2-HVR- | SIYYTGNGYYNP | 441 |
| H2-T57G | | |
| mAb2-HVR- | SIYYTGNHYYNP | 442 |
| H2-T57H | | |
| mAb2-HVR- | SIYYTGNKYYNP | 443 |
| H2-T57K | | |
| mAb2-HVR- | SIYYTGNPYYNP | 444 |
| H2-T57P | | |
| mAb2-HVR- | SIYYTGNQYYNP | 445 |
| H2-T57Q | | |
| mAb2-HVR- | SIYYTGNRYYNP | 446 |
| H2-T57R | | |
| mAb2-HVR- | SIYYTGNSYYNP | 447 |
| H2-T57S | | |
| mAb2-HVR- | SIYYTGNVYYNP | 448 |
| H2-T57V | | |
| mAb2-HVR- | SIYYTGNWYYNP | 449 |
| H2-T57W | | |
| mAb2-HVR- | SIYYTGNYYYNP | 450 |
| H2-T57Y | | |
| mAb2-HVR- | SIYYTGNTWYNP | 451 |
| H2-Y58W | | |
| mAb2-HVR- | SIYYTGNTYYAP | 452 |
| H2-N60A | | |
| mAb2-HVR- | SIYYTGNTYYDP | 453 |
| H2-N60D | | |
| mAb2-HVR- | SIYYTGNTYYEP | 454 |
| H2-N60E | | |
| mAb2-HVR- | SIYYTGNTYYKP | 455 |
| H2-N60K | | |
| mAb2-HVR- | SIYYTGNTYYLP | 456 |
| H2-N60L | | |
| mAb2-HVR- | SIYYTGNTYYMP | 457 |
| H2-N60M | | |
| mAb2-HVR- | SIYYTGNTYYPP | 458 |
| H2-N60P | | |
| mAb2-HVR- | SIYYTGNTYYQP | 459 |
| H2-N60Q | | |
| mAb2-HVR- | SIYYTGNTYYSP | 460 |
| H2-N60S | | |
| mAb2-HVR- | SIYYTGNTYYTP | 461 |
| H2-N60T | | |
| mAb2-HVR- | XXXXXGXXVPRXFDP | 462 |
| H3-generic | X at position 1 is A or V; | |
| | X at position 2 is R, A, G, N, Q, | |
| | or T; | |
| | X at position 3 is V, A, F, I, K, L, | |
| | M, Q, or S; | |
| | X at position 4 is R, A, I, K, L, M, | |
| | P, Q, S, T, or V; | |
| | X at position 5 is Y, H, I, L, or V; | |
| | X at position 7 is V, A, F, G, K, M, | |
| | N, Q, R, S, T, W, or Y; | |
| | X at position 8 is G, N, R, S, or T; | |
| | X at position 12 is Y, F, H, I, L, M, | |
| | Q, or R. | |
| mAb2-HVR- | VRVRYGVGVPRYFDP | 463 |
| H3-A93V | | |
| mAb2-HVR- | AAVRYGVGVPRYFDP | 464 |
| H3-R94A | | |
| mAb2-HVR- | AGVRYGVGVPRYFDP | 465 |
| H3-R94G | | |
| mAb2-HVR- | ANVRYGVGVPRYFDP | 466 |
| H3-R94N | | |
| mAb2-HVR- | AQVRYGVGVPRYFDP | 467 |
| H3-R94Q | | |
| mAb2-HVR- | ATVRYGVGVPRYFDP | 468 |
| H3-R94T | | |
| mAb2-HVR- | ARARYGVGVPRYFDP | 469 |
| H3-V95A | | |
| mAb2-HVR- | ARFRYGVGVPRYFDP | 470 |
| H3-V95F | | |
| mAb2-HVR- | ARIRYGVGVPRYFDP | 471 |
| H3-V95I | | |
| mAb2-HVR- | ARKRYGVGVPRYFDP | 472 |
| H3-V95K | | |
| mAb2-HVR- | ARLRYGVGVPRYFDP | 473 |
| H3-V95L | | |
| mAb2-HVR- | ARMRYGVGVPRYFDP | 474 |
| H3-V95M | | |
| mAb2-HVR- | ARQRYGVGVPRYFDP | 475 |
| H3-V95Q | | |
| mAb2-HVR- | ARSRYGVGVPRYFDP | 476 |
| H3-V95S | | |
| mAb2-HVR- | ARVAYGVGVPRYFDP | 477 |
| H3-R96A | | |
| mAb2-HVR- | ARVIYGVGVPRYFDP | 478 |
| H3-R96I | | |
| mAb2-HVR- | ARVKYGVGVPRYFDP | 479 |
| H3-R96K | | |
| mAb2-HVR- | ARVLYGVGVPRYFDP | 480 |
| H3-R96L | | |
| mAb2-HVR- | ARVMYGVGVPRYFDP | 481 |
| H3-R96M | | |
| mAb2-HVR- | ARVPYGVGVPRYFDP | 482 |
| H3-R96P | | |
| mAb2-HVR- | ARVQYGVGVPRYFDP | 483 |
| H3-R96Q | | |
| mAb2-HVR- | ARVSYGVGVPRYFDP | 484 |
| H3-R96S | | |
| mAb2-HVR- | ARVTYGVGVPRYFDP | 485 |
| H3-R96T | | |
| mAb2-HVR- | ARVVYGVGVPRYFDP | 486 |
| H3-R96V | | |
| mAb2-HVR- | ARVRHGVGVPRYFDP | 487 |
| H3-Y97H | | |
| mAb2-HVR- | ARVRIGVGVPRYFDP | 488 |
| H3-Y97I | | |
| mAb2-HVR- | ARVRLGVGVPRYFDP | 489 |
| H3-Y97L | | |
| mAb2-HVR- | ARVRVGVGVPRYFDP | 490 |
| H3-Y97V | | |
| mAb2-HVR- | ARVRYGAGVPRYFDP | 491 |
| H3-V99A | | |
| mAb2-HVR- | ARVRYGFGVPRYFDP | 492 |
| H3-V99F | | |
| mAb2-HVR- | ARVRYGGGVPRYFDP | 493 |
| H3-V99G | | |
| mAb2-HVR- | ARVRYGKGVPRYFDP | 494 |
| H3-V99K | | |
| mAb2-HVR- | ARVRYGMGVPRYFDP | 495 |
| H3-V99M | | |
| mAb2-HVR- | ARVRYGNGVPRYFDP | 496 |
| H3-V99N | | |
| mAb2-HVR- | ARVRYGQGVPRYFDP | 497 |
| H3-V99Q | | |
| mAb2-HVR- | ARVRYGRGVPRYFDP | 498 |
| H3-V99R | | |
| mAb2-HVR- | ARVRYGSGVPRYFDP | 499 |
| H3-V99S | | |
| mAb2-HVR- | ARVRYGTGVPRYFDP | 500 |
| H3-V99T | | |
| mAb2-HVR- | ARVRYGWGVPRYFDP | 501 |
| H3-V99W | | |
| mAb2-HVR- | ARVRYGYGVPRYFDP | 502 |
| H3-V99Y | | |
| mAb2-HVR- | ARVRYGVNVPRYFDP | 503 |
| H3-G100N | | |
| mAb2-HVR- | ARVRYGVRVPRYFDP | 504 |
| H3-G100R | | |
| mAb2-HVR- | ARVRYGVSVPRYFDP | 505 |
| H3-G100S | | |
| mAb2-HVR- | ARVRYGVTVPRYFDP | 506 |
| H3-G100T | | |
| mAb2-HVR- | ARVRYGVGVPRFFDP | 507 |
| H3-Y100dF | | |
| mAb2-HVR- | ARVRYGVGVPRHFDP | 508 |
| H3-Y100dH | | |
| mAb2-HVR- | ARVRYGVGVPRIFDP | 509 |
| H3-Y100dI | | |
| mAb2-HVR- | ARVRYGVGVPRLFDP | 510 |
| H3-Y100dL | | |
| mAb2-HVR- | ARVRYGVGVPRMFDP | 511 |
| H3-Y100dM | | |
| mAb2-HVR- | ARVRYGVGVPRQFDP | 512 |
| H3-Y100dQ | | |
| mAb2-HVR- | ARVRYGVGVPRRFDP | 513 |
| H3-Y100dR | | |
| mAb6_2.7-HC | ELQLQESGPGLVKPSETLSLTCTVSGGSITASNTYWGW | 581 |
| (SEQ ID | IRQPPGKGLEWIGSIDYTGSTYYNPSLKSRVTISVDTSK | |
| NO: 191) + | NQFSLKLSSVTAADTAVYYCATGKYYETYLGFDVWG | |
| c-term K | QGTLVTVSSASTKGPSVFPLAPSSKSTSGGTAALGCLV | |
| | KDYFPEPVTVSWNSGALTSGVHTFPAVLQSSGLYSLSS | |
| | VVTVPSSSLGTQTYICNVNHKPSNTKVDKKVEPKSCD | |
| | KTHTCPPCPAPELLGGPSVFLFPPKPKDTLMISRTPEVT | |
| | CVVVDVSHEDPEVKFNWYVDGVEVHNAKTKPREEQY | |
| | GSTYRVVSVLTVLHQDWLNGKEYKCKVSNKALPAPIE | |
| | KTISKAKGQPREPQVYTLPPSRDELTKNQVSLTCLVKG | |
| | FYPSDIAVEWESNGQPENNYKTTPPVLDSDGSFFLYSK | |
| | LTVDKSRWQQGNVFSCSVMHEALHNHYTQKSLSLSPG | |
| | K | |
| mAb6_2.7-HC | ELQLQESGPGLVKPSETLSLTCTVSGGSITASNTYWGW | 582 |
| (SEQ ID | IRQPPGKGLEWIGSIDYTGSTYYNPSLKSRVTISVDTSK | |
| NO: 191) + | NQFSLKLSSVTAADTAVYYCATGKYYETYLGFDVWG | |
| YTE | QGTLVTVSSASTKGPSVFPLAPSSKSTSGGTAALGCLV | |
| | KDYFPEPVTVSWNSGALTSGVHTFPAVLQSSGLYSLSS | |
| | VVTVPSSSLGTQTYICNVNHKPSNTKVDKKVEPKSCD | |
| | KTHTCPPCPAPELLGGPSVFLFPPKPKDTLYITREPEVT | |
| | CVVVDVSHEDPEVKFNWYVDGVEVHNAKTKPREEQY | |
| | GSTYRVVSVLTVIHQDWLNGKEYKCKVSNKALPAPIE | |
| | KTISKAKGQPREPQVYTLPPSRDELTKNQVSLTCLVKG | |
| | FYPSDIAVEWESNGQPENNYKTTPPVLDSDGSFFLYSK | |
| | LTVDKSRWQQGNVFSCSVMHEALHNHYTQKSLSLSPG | |
| mAb6_2.7-HC | ELQLQESGPGLVKPSETLSLTCTVSGGSITASNTYWGW | 583 |
| (SEQ ID | IRQPPGKGLEWIGSIDYTGSTYYNPSLKSRVTISVDTSK | |
| NO: 191) + | NQFSLKLSSVTAADTAVYYCATGKYYETYLGFDVWG | |
| YTE + | QGTLVTVSSASTKGPSVFPLAPSSKSTSGGTAALGCLV | |
| c-term K | KDYFPEPVTVSWNSGALTSGVHTFPAVLQSSGLYSLSS | |
| | VVTVPSSSLGTQTYICNVNHKPSNTKVDKKVEPKSCD | |
| | KTHTCPPCPAPELLGGPSVFLFPPKPKDTLYITREPEVT | |
| | CVVVDVSHEDPEVKFNWYVDGVEVHNAKTKPREEQY | |
| | GSTYRVVSVLTVLHQDWLNGKEYKCKVSNKALPAPIE | |
| | KTISKAKGQPREPQVYTLPPSRDELTKNQVSLTCLVKG | |
| | FYPSDIAVEWESNGQPENNYKTTPPVLDSDGSFFLYSK | |
| | LTVDKSRWQQGNVFSCSVMHEALHNHYTQKSLSLSPG | |
| | K | |
| mAb6_2.7-HC | ELQLQESGPGLVKPSETLSLTCTVSGGSITASNTYWGW | 584 |
| (knob) | IRQPPGKGLEWIGSIDYTGSTYYNPSLKSRVTISVDTSK | |
| (SEQ ID | NQFSLKLSSVTAADTAVYYCATGKYYETYLGFDVWG | |
| NO: 192) + | QGTLVTVSSASTKGPSVFPLAPSSKSTSGGTAALGCLV | |
| c-term K | KDYFPEPVTVSWNSGALTSGVHTFPAVLQSSGLYSLSS | |
| | VVTVPSSSLGTQTYICNVNHKPSNTKVDKKVEPKSCD | |
| | KTHTCPPCPAPELLGGPSVFLFPPKPKDTLMISRTPEVT | |
| | CVVVDVSHEDPEVKFNWYVDGVEVHNAKTKPREEQY | |
| | GSTYRVVSVLTVLHQDWLNGKEYKCKVSNKALPAPIE | |
| | KTISKAKGQPREPQVYTLPPSRDELTKNQVSLWCLVK | |
| | GFYPSDIAVEWESNGQPENNYKTTPPVLDSDGSFFLYS | |
| | KLTVDKSRWQQGNVFSCSVMHEALHNHYTQKSLSLSP | |
| | GK | |
| mAb6_2.7-HC | ELQLQESGPGLVKPSETLSLTCTVSGGSITASNTYWGW | 585 |
| (knob) | IRQPPGKGLEWIGSIDYTGSTYYNPSLKSRVTISVDTSK | |
| (SEQ ID | NQFSLKLSSVTAADTAVYYCATGKYYETYLGFDVWG | |
| NO: 192) + | QGTLVTVSSASTKGPSVFPLAPSSKSTSGGTAALGCLV | |
| YTE | KDYFPEPVTVSWNSGALTSGVHTFPAVLQSSGLYSLSS | |
| | VVTVPSSSLGTQTYICNVNHKPSNTKVDKKVEPKSCD | |
| | KTHTCPPCPAPELLGGPSVFLFPPKPKDTLYITREPEVT | |
| | CVVVDVSHEDPEVKFNWYVDGVEVHNAKTKPREEQY | |
| | GSTYRVVSVLTVIHQDWLNGKEYKCKVSNKALPAPIE | |
| | KTISKAKGQPREPQVYTLPPSRDELTKNQVSLWCLVK | |
| | GFYPSDIAVEWESNGQPENNYKTTPPVLDSDGSFFLYS | |
| | KLTVDKSRWQQGNVFSCSVMHEALHNHYTQKSLSLSP | |
| | G | |
| mAb6_2.7-HC | ELQLQESGPGLVKPSETLSLTCTVSGGSITASNTYWGW | 586 |
| (knob) | IRQPPGKGLEWIGSIDYTGSTYYNPSLKSRVTISVDTSK | |
| (SEQ ID | NQFSLKLSSVTAADTAVYYCATGKYYETYLGFDVWG | |
| NO: 192) + | QGTLVTVSSASTKGPSVFPLAPSSKSTSGGTAALGCLV | |
| YTE + | KDYFPEPVTVSWNSGALTSGVHTFPAVLQSSGLYSLSS | |
| c-term K | VVTVPSSSLGTQTYICNVNHKPSNTKVDKKVEPKSCD | |
| (also | KTHTCPPCPAPELLGGPSVFLFPPKPKDTLYITREPEVT | |
| referred to | CVVVDVSHEDPEVKFNWYVDGVEVHNAKTKPREEQY | |
| as HCβ31) | GSTYRVVSVLTVLHQDWLNGKEYKCKVSNKALPAPIE | |
| | KTISKAKGQPREPQVYTLPPSRDELTKNQVSLWCLVK | |
| | GFYPSDIAVEWESNGQPENNYKTTPPVLDSDGSFFLYS | |
| | KLTVDKSRWQQGNVFSCSVMHEALHNHYTQKSLSLSP | |
| | GK | |
| mAb6_2.7-HC | ELQLQESGPGLVKPSETLSLTCTVSGGSITASNTYWGW | 587 |
| (hole) | IRQPPGKGLEWIGSIDYTGSTYYNPSLKSRVTISVDTSK | |
| (SEQ ID | NQFSLKLSSVTAADTAVYYCATGKYYETYLGFDVWG | |
| NO: 193) + | QGTLVTVSSASTKGPSVFPLAPSSKSTSGGTAALGCLV | |
| c-term K | KDYFPEPVTVSWNSGALTSGVHTFPAVLQSSGLYSLSS | |
| | VVTVPSSSLGTQTYICNVNHKPSNTKVDKKVEPKSCD | |
| | KTHTCPPCPAPELLGGPSVFLFPPKPKDTLMISRTPEVT | |
| | CVVVDVSHEDPEVKFNWYVDGVEVHNAKTKPREEQY | |
| | GSTYRVVSVLTVLHQDWLNGKEYKCKVSNKALPAPIE | |
| | KTISKAKGQPREPQVYTLPPSRDELTKNQVSLSCAVKG | |
| | FYPSDIAVEWESNGQPENNYKTTPPVLDSDGSFFLVSK | |
| | LTVDKSRWQQGNVFSCSVMHEALHNHYTQKSLSLSPG | |
| | K | |
| mAb6_2.7-HC | ELQLQESGPGLVKPSETLSLTCTVSGGSITASNTYWGW | 588 |
| (hole) | IRQPPGKGLEWIGSIDYTGSTYYNPSLKSRVTISVDTSK | |
| (SEQ ID | NQFSLKLSSVTAADTAVYYCATGKYYETYLGFDVWG | |
| NO: 193) + | QGTLVTVSSASTKGPSVFPLAPSSKSTSGGTAALGCLV | |
| YTE | KDYFPEPVTVSWNSGALTSGVHTFPAVLQSSGLYSLSS | |
| (also | VVTVPSSSLGTQTYICNVNHKPSNTKVDKKVEPKSCD | |
| referred to | KTHTCPPCPAPELLGGPSVFLFPPKPKDTLYITREPEVT | |
| as HCβ32) | CVVVDVSHEDPEVKFNWYVDGVEVHNAKTKPREEQY | |
| | GSTYRVVSVLTVIHQDWLNGKEYKCKVSNKALPAPIE | |
| | KTISKAKGQPREPQVYTLPPSRDELTKNQVSLSCAVKG | |
| | FYPSDIAVEWESNGQPENNYKTTPPVLDSDGSFFLVSK | |
| | LTVDKSRWQQGNVFSCSVMHEALHNHYTQKSLSLSPG | |
| mAb6_2.7-HC | ELQLQESGPGLVKPSETLSLTCTVSGGSITASNTYWGW | 589 |
| (hole) | IRQPPGKGLEWIGSIDYTGSTYYNPSLKSRVTISVDTSK | |
| (SEQ ID | NQFSLKLSSVTAADTAVYYCATGKYYETYLGFDVWG | |
| NO: 193) + | QGTLVTVSSASTKGPSVFPLAPSSKSTSGGTAALGCLV | |
| YTE + | KDYFPEPVTVSWNSGALTSGVHTFPAVLQSSGLYSLSS | |
| c-term K | VVTVPSSSLGTQTYICNVNHKPSNTKVDKKVEPKSCD | |
| | KTHTCPPCPAPELLGGPSVFLFPPKPKDTLYITREPEVT | |
| | CVVVDVSHEDPEVKFNWYVDGVEVHNAKTKPREEQY | |
| | GSTYRVVSVLTVLHQDWLNGKEYKCKVSNKALPAPIE | |
| | KTISKAKGQPREPQVYTLPPSRDELTKNQVSLSCAVKG | |
| | FYPSDIAVEWESNGQPENNYKTTPPVLDSDGSFFLVSK | |
| | LTVDKSRWQQGNVFSCSVMHEALHNHYTQKSLSLSPG | |
| | K | |
| mAb2-HC | ELQLQESGPGLVKPSETLSLTCTVSGGSISTSSYYWGWI | 617 |
| (SEQ ID | RQPPGKGLEWIGSIYYTGNTYYNPSLKSRVTISVDTSK | |
| NO: 203) + | NQFSLKLSSVTAADTAVYYCARVRYGVGVPRYFDPW | |
| c-term K | GQGTLVTVSSASTKGPSVFPLAPSSKSTSGGTAALGCL | |
| | VKDYFPEPVTVSWNSGALTSGVHTFPAVLQSSGLYSLS | |
| | SVVTVPSSSLGTQTYICNVNHKPSNTKVDKKVEPKSCD | |
| | KTHTCPPCPAPELLGGPSVFLFPPKPKDTLMISRTPEVT | |
| | CVVVDVSHEDPEVKFNWYVDGVEVHNAKTKPREEQY | |
| | GSTYRVVSVLTVLHQDWLNGKEYKCKVSNKALPAPIE | |
| | KTISKAKGQPREPQVYTLPPSRDELTKNQVSLTCLVKG | |
| | FYPSDIAVEWESNGQPENNYKTTPPVLDSDGSFFLYSK | |
| | LTVDKSRWQQGNVFSCSVMHEALHNHYTQKSLSLSPG | |
| | K | |
| mAb2-HC | ELQLQESGPGLVKPSETLSLTCTVSGGSISTSSYYWGWI | 618 |
| (SEQ ID | RQPPGKGLEWIGSIYYTGNTYYNPSLKSRVTISVDTSK | |
| NO: 203) + | NQFSLKLSSVTAADTAVYYCARVRYGVGVPRYFDPW | |
| YTE | GQGTLVTVSSASTKGPSVFPLAPSSKSTSGGTAALGCL | |
| | VKDYFPEPVTVSWNSGALTSGVHTFPAVLQSSGLYSLS | |
| | SVVTVPSSSLGTQTYICNVNHKPSNTKVDKKVEPKSCD | |
| | KTHTCPPCPAPELLGGPSVFLFPPKPKDTYITRETPEVT | |
| | CVVVDVSHEDPEVKFNWYVDGVEVHNAKTKPREEQY | |
| | GSTYRVVSVLTVIHQDWLNGKEYKCKVSNKALPAPIE | |
| | KTISKAKGQPREPQVYTLPPSRDELTKNQVSLTCLVKG | |
| | FYPSDIAVEWESNGQPENNYKTTPPVLDSDGSFFLYSK | |
| | LTVDKSRWQQGNVFSCSVMHEALHNHYTQKSLSLSPG | |
| mAb2-HC | ELQLQESGPGLVKPSETLSLTCTVSGGSISTSSYYWGWI | 619 |
| (SEQ ID | RQPPGKGLEWIGSIYYTGNTYYNPSLKSRVTISVDTSK | |
| NO: 203) + | NQFSLKLSSVTAADTAVYYCARVRYGVGVPRYFDPW | |
| YTE + | GQGTLVTVSSASTKGPSVFPLAPSSKSTSGGTAALGCL | |
| c-term K | VKDYFPEPVTVSWNSGALTSGVHTFPAVLQSSGLYSLS | |
| | SVVTVPSSSLGTQTYICNVNHKPSNTKVDKKVEPKSCD | |
| | KTHTCPPCPAPELLGGPSVFLFPPKPKDTYITRETPEVT | |
| | CVVVDVSHEDPEVKFNWYVDGVEVHNAKTKPREEQY | |
| | GSTYRVVSVLTVLHQDWLNGKEYKCKVSNKALPAPIE | |
| | KTISKAKGQPREPQVYTLPPSRDELTKNQVSLTCLVKG | |
| | FYPSDIAVEWESNGQPENNYKTTPPVLDSDGSFFLYSK | |
| | LTVDKSRWQQGNVFSCSVMHEALHNHYTQKSLSLSPG | |
| | K | |
| mAb2-HC | ELQLQESGPGLVKPSETLSLTCTVSGGSISTSSYYWGWI | 620 |
| (knob) | RQPPGKGLEWIGSIYYTGNTYYNPSLKSRVTISVDTSK | |
| (SEQ ID | NQFSLKLSSVTAADTAVYYCARVRYGVGVPRYFDPW | |
| NO: 204) + | GQGTLVTVSSASTKGPSVFPLAPSSKSTSGGTAALGCL | |
| c-term K | VKDYFPEPVTVSWNSGALTSGVHTFPAVLQSSGLYSLS | |
| | SVVTVPSSSLGTQTYICNVNHKPSNTKVDKKVEPKSCD | |
| | KTHTCPPCPAPELLGGPSVFLFPPKPKDTLMISRTPEVT | |
| | CVVVDVSHEDPEVKFNWYVDGVEVHNAKTKPREEQY | |
| | GSTYRVVSVLTVLHQDWLNGKEYKCKVSNKALPAPIE | |
| | KTISKAKGQPREPQVYTLPPSRDELTKNQVSLWCLVK | |
| | GFYPSDIAVEWESNGQPENNYKTTPPVLDSDGSFFLYS | |
| | KLTVDKSRWQQGNVFSCSVMHEALHNHYTQKSLSLSP | |
| | GK | |
| mAb2-HC | ELQLQESGPGLVKPSETLSLTCTVSGGSISTSSYYWGWI | 621 |
| (knob) | RQPPGKGLEWIGSIYYTGNTYYNPSLKSRVTISVDTSK | |
| (SEQ ID | NQFSLKLSSVTAADTAVYYCARVRYGVGVPRYFDPW | |
| NO: 204) + | GQGTLVTVSSASTKGPSVFPLAPSSKSTSGGTAALGCL | |
| YTE | VKDYFPEPVTVSWNSGALTSGVHTFPAVLQSSGLYSLS | |
| | SVVTVPSSSLGTQTYICNVNHKPSNTKVDKKVEPKSCD | |
| | KTHTCPPCPAPELLGGPSVFLFPPKPKDTYITRETPEVT | |
| | CVVVDVSHEDPEVKFNWYVDGVEVHNAKTKPREEQY | |
| | GSTYRVVSVLTVIHQDWLNGKEYKCKVSNKALPAPIE | |
| | KTISKAKGQPREPQVYTLPPSRDELTKNQVSLWCLVK | |
| | GFYPSDIAVEWESNGQPENNYKTTPPVLDSDGSFFLYS | |
| | KLTVDKSRWQQGNVFSCSVMHEALHNHYTQKSLSLSP | |
| | G | |
| mAb2-HC | ELQLQESGPGLVKPSETLSLTCTVSGGSISTSSYYWGWI | 622 |
| (knob) | RQPPGKGLEWIGSIYYTGNTYYNPSLKSRVTISVDTSK | |
| (SEQ ID | NQFSLKLSSVTAADTAVYYCARVRYGVGVPRYFDPW | |
| NO: 204) + | GQGTLVTVSSASTKGPSVFPLAPSSKSTSGGTAALGCL | |
| YTE + | VKDYFPEPVTVSWNSGALTSGVHTFPAVLQSSGLYSLS | |
| c-term K | SVVTVPSSSLGTQTYICNVNHKPSNTKVDKKVEPKSCD | |
| | KTHTCPPCPAPELLGGPSVFLFPPKPKDTYITRETPEVT | |
| | CVVVDVSHEDPEVKFNWYVDGVEVHNAKTKPREEQY | |
| | GSTYRVVSVLTVLHQDWLNGKEYKCKVSNKALPAPIE | |
| | KTISKAKGQPREPQVYTLPPSRDELTKNQVSLWCLVK | |
| | GFYPSDIAVEWESNGQPENNYKTTPPVLDSDGSFFLYS | |
| | KLTVDKSRWQQGNVFSCSVMHEALHNHYTQKSLSLSP | |
| | GK | |
| mAb2-HC | ELQLQESGPGLVKPSETLSLTCTVSGGSISTSSYYWGWI | 623 |
| (hole) | RQPPGKGLEWIGSIYYTGNTYYNPSLKSRVTISVDTSK | |
| (SEQ ID | NQFSLKLSSVTAADTAVYYCARVRYGVGVPRYFDPW | |
| NO: 205) + | GQGTLVTVSSASTKGPSVFPLAPSSKSTSGGTAALGCL | |
| c-term K | VKDYFPEPVTVSWNSGALTSGVHTFPAVLQSSGLYSLS | |
| | SVVTVPSSSLGTQTYICNVNHKPSNTKVDKKVEPKSCD | |
| | KTHTCPPCPAPELLGGPSVFLFPPKPKDTLMISRTPEVT | |
| | CVVVDVSHEDPEVKFNWYVDGVEVHNAKTKPREEQY | |
| | GSTYRVVSVLTVLHQDWLNGKEYKCKVSNKALPAPIE | |
| | KTISKAKGQPREPQVYTLPPSRDELTKNQVSLSCAVKG | |
| | FYPSDIAVEWESNGQPENNYKTTPPVLDSDGSFFLVSK | |
| | LTVDKSRWQQGNVFSCSVMHEALHNHYTQKSLSLSPG | |
| | K | |
| mAb2-HC | ELQLQESGPGLVKPSETLSLTCTVSGGSISTSSYYWGWI | 624 |
| (hole) | RQPPGKGLEWIGSIYYTGNTYYNPSLKSRVTISVDTSK | |
| (SEQ ID | NQFSLKLSSVTAADTAVYYCARVRYGVGVPRYFDPW | |
| NO: 205) + | GQGTLVTVSSASTKGPSVFPLAPSSKSTSGGTAALGCL | |
| YTE | VKDYFPEPVTVSWNSGALTSGVHTFPAVLQSSGLYSLS | |
| | SVVTVPSSSLGTQTYICNVNHKPSNTKVDKKVEPKSCD | |
| | KTHTCPPCPAPELLGGPSVFLFPPKPKDTYITRETPEVT | |
| | CVVVDVSHEDPEVKFNWYVDGVEVHNAKTKPREEQY | |
| | GSTYRVVSVLTVIHQDWLNGKEYKCKVSNKALPAPIE | |
| | KTISKAKGQPREPQVYTLPPSRDELTKNQVSLSCAVKG | |
| | FYPSDIAVEWESNGQPENNYKTTPPVLDSDGSFFLVSK | |
| | LTVDKSRWQQGNVFSCSVMHEALHNHYTQKSLSLSPG | |
| mAb2-HC | ELQLQESGPGLVKPSETLSLTCTVSGGSISTSSYYWGWI | 625 |
| (hole) | RQPPGKGLEWIGSIYYTGNTYYNPSLKSRVTISVDTSK | |
| (SEQ ID | NQFSLKLSSVTAADTAVYYCARVRYGVGVPRYFDPW | |
| NO: 205) + | GQGTLVTVSSASTKGPSVFPLAPSSKSTSGGTAALGCL | |
| YTE + | VKDYFPEPVTVSWNSGALTSGVHTFPAVLQSSGLYSLS | |
| c-term K | SVVTVPSSSLGTQTYICNVNHKPSNTKVDKKVEPKSCD | |
| | KTHTCPPCPAPELLGGPSVFLFPPKPKDTYITRETPEVT | |
| | CVVVDVSHEDPEVKFNWYVDGVEVHNAKTKPREEQY | |
| | GSTYRVVSVLTVLHQDWLNGKEYKCKVSNKALPAPIE | |
| | KTISKAKGQPREPQVYTLPPSRDELTKNQVSLSCAVKG | |
| | FYPSDIAVEWESNGQPENNYKTTPPVLDSDGSFFLVSK | |
| | LTVDKSRWQQGNVFSCSVMHEALHNHYTQKSLSLSPG | |
| | K | |
| mAb2.10-HC | ELQLQESGPGLVKPSETLSLTCTVSGGSISDSSYYWGWI | 707 |
| (SEQ ID | RQPPGKGLEWIGSIYYTGETYYAPSLKSRVTISVDTSKN | |
| NO: 233) + | QFSLKLSSVTAADTAVYYCARVRYGVGVPRHFDPWG | |
| c-term K | QGTLVTVSSASTKGPSVFPLAPSSKSTSGGTAALGCLV | |
| | KDYFPEPVTVSWNSGALTSGVHTFPAVLQSSGLYSLSS | |
| | VVTVPSSSLGTQTYICNVNHKPSNTKVDKKVEPKSCD | |
| | KTHTCPPCPAPELLGGPSVFLFPPKPKDTLMISRTPEVT | |
| | CVVVDVSHEDPEVKFNWYVDGVEVHNAKTKPREEQY | |
| | GSTYRVVSVLTVLHQDWLNGKEYKCKVSNKALPAPIE | |
| | KTISKAKGQPREPQVYTLPPSRDELTKNQVSLTCLVKG | |
| | FYPSDIAVEWESNGQPENNYKTTPPVLDSDGSFFLYSK | |
| | LTVDKSRWQQGNVFSCSVMHEALHNHYTQKSLSLSPG | |
| | K | |
| mAb2.10-HC | ELQLQESGPGLVKPSETLSLTCTVSGGSISDSSYYWGWI | 708 |
| (SEQ ID | RQPPGKGLEWIGSIYYTGETYYAPSLKSRVTISVDTSKN | |
| NO: 233) + | QFSLKLSSVTAADTAVYYCARVRYGVGVPRHFDPWG | |
| YTE | QGTLVTVSSASTKGPSVFPLAPSSKSTSGGTAALGCLV | |
| | KDYFPEPVTVSWNSGALTSGVHTFPAVLQSSGLYSLSS | |
| | VVTVPSSSLGTQTYICNVNHKPSNTKVDKKVEPKSCD | |
| | KTHTCPPCPAPELLGGPSVFLFPPKPKDTYITRETPEVT | |
| | CVVVDVSHEDPEVKFNWYVDGVEVHNAKTKPREEQY | |
| | GSTYRVVSVLTVIHQDWLNGKEYKCKVSNKALPAPIE | |
| | KTISKAKGQPREPQVYTLPPSRDELTKNQVSLTCLVKG | |
| | FYPSDIAVEWESNGQPENNYKTTPPVLDSDGSFFLYSK | |
| | LTVDKSRWQQGNVFSCSVMHEALHNHYTQKSLSLSPG | |
| mAb2.10-HC | ELQLQESGPGLVKPSETLSLTCTVSGGSISDSSYYWGWI | 709 |
| (SEQ ID | RQPPGKGLEWIGSIYYTGETYYAPSLKSRVTISVDTSKN | |
| NO: 233) + | QFSLKLSSVTAADTAVYYCARVRYGVGVPRHFDPWG | |
| YTE + | QGTLVTVSSASTKGPSVFPLAPSSKSTSGGTAALGCLV | |
| c-term K | KDYFPEPVTVSWNSGALTSGVHTFPAVLQSSGLYSLSS | |
| | VVTVPSSSLGTQTYICNVNHKPSNTKVDKKVEPKSCD | |
| | KTHTCPPCPAPELLGGPSVFLFPPKPKDTYITRETPEVT | |
| | CVVVDVSHEDPEVKFNWYVDGVEVHNAKTKPREEQY | |
| | GSTYRVVSVLTVLHQDWLNGKEYKCKVSNKALPAPIE | |
| | KTISKAKGQPREPQVYTLPPSRDELTKNQVSLTCLVKG | |
| | FYPSDIAVEWESNGQPENNYKTTPPVLDSDGSFFLYSK | |
| | LTVDKSRWQQGNVFSCSVMHEALHNHYTQKSLSLSPG | |
| | K | |
| mAb2.10-HC | ELQLQESGPGLVKPSETLSLTCTVSGGSISDSSYYWGWI | 710 |
| (knob) | RQPPGKGLEWIGSIYYTGETYYAPSLKSRVTISVDTSKN | |
| (SEQ ID | QFSLKLSSVTAADTAVYYCARVRYGVGVPRHFDPWG | |
| NO: 234) + | QGTLVTVSSASTKGPSVFPLAPSSKSTSGGTAALGCLV | |
| c-term K | KDYFPEPVTVSWNSGALTSGVHTFPAVLQSSGLYSLSS | |
| | VVTVPSSSLGTQTYICNVNHKPSNTKVDKKVEPKSCD | |
| | KTHTCPPCPAPELLGGPSVFLFPPKPKDTLMISRTPEVT | |
| | CVVVDVSHEDPEVKFNWYVDGVEVHNAKTKPREEQY | |
| | GSTYRVVSVLTVLHQDWLNGKEYKCKVSNKALPAPIE | |
| | KTISKAKGQPREPQVYTLPPSRDELTKNQVSLWCLVK | |
| | GFYPSDIAVEWESNGQPENNYKTTPPVLDSDGSFFLYS | |
| | KLTVDKSRWQQGNVFSCSVMHEALHNHYTQKSLSLSP | |
| | GK | |
| mAb2.10-HC | ELQLQESGPGLVKPSETLSLTCTVSGGSISDSSYYWGWI | 711 |
| (knob) | RQPPGKGLEWIGSIYYTGETYYAPSLKSRVTISVDTSKN | |
| (SEQ ID | QFSLKLSSVTAADTAVYYCARVRYGVGVPRHFDPWG | |
| NO: 234) + | QGTLVTVSSASTKGPSVFPLAPSSKSTSGGTAALGCLV | |
| YTE | KDYFPEPVTVSWNSGALTSGVHTFPAVLQSSGLYSLSS | |
| | VVTVPSSSLGTQTYICNVNHKPSNTKVDKKVEPKSCD | |
| | KTHTCPPCPAPELLGGPSVFLFPPKPKDTYITRETPEVT | |
| | CVVVDVSHEDPEVKFNWYVDGVEVHNAKTKPREEQY | |
| | GSTYRVVSVLTVIHQDWLNGKEYKCKVSNKALPAPIE | |
| | KTISKAKGQPREPQVYTLPPSRDELTKNQVSLWCLVK | |
| | GFYPSDIAVEWESNGQPENNYKTTPPVLDSDGSFFLYS | |
| | KLTVDKSRWQQGNVFSCSVMHEALHNHYTQKSLSLSP | |
| | G | |
| mAb2.10-HC | ELQLQESGPGLVKPSETLSLTCTVSGGSISDSSYYWGWI | 712 |
| (knob) | RQPPGKGLEWIGSIYYTGETYYAPSLKSRVTISVDTSKN | |
| (SEQ ID | QFSLKLSSVTAADTAVYYCARVRYGVGVPRHFDPWG | |
| NO: 234) + | QGTLVTVSSASTKGPSVFPLAPSSKSTSGGTAALGCLV | |
| YTE + | KDYFPEPVTVSWNSGALTSGVHTFPAVLQSSGLYSLSS | |
| c-term K | VVTVPSSSLGTQTYICNVNHKPSNTKVDKKVEPKSCD | |
| (also | KTHTCPPCPAPELLGGPSVFLFPPKPKDTYITRETPEVT | |
| referred to | CVVVDVSHEDPEVKFNWYVDGVEVHNAKTKPREEQY | |
| as HCαγ31) | GSTYRVVSVLTVLHQDWLNGKEYKCKVSNKALPAPIE | |
| | KTISKAKGQPREPQVYTLPPSRDELTKNQVSLWCLVK | |
| | GFYPSDIAVEWESNGQPENNYKTTPPVLDSDGSFFLYS | |
| | KLTVDKSRWQQGNVFSCSVMHEALHNHYTQKSLSLSP | |
| | GK | |
| mAb2.10-HC | ELQLQESGPGLVKPSETLSLTCTVSGGSISDSSYYWGWI | 713 |
| (hole) | RQPPGKGLEWIGSIYYTGETYYAPSLKSRVTISVDTSKN | |
| (SEQ ID | QFSLKLSSVTAADTAVYYCARVRYGVGVPRHFDPWG | |
| NO: 235) + | QGTLVTVSSASTKGPSVFPLAPSSKSTSGGTAALGCLV | |
| c-term K | KDYFPEPVTVSWNSGALTSGVHTFPAVLQSSGLYSLSS | |
| | VVTVPSSSLGTQTYICNVNHKPSNTKVDKKVEPKSCD | |
| | KTHTCPPCPAPELLGGPSVFLFPPKPKDTLMISRTPEVT | |
| | CVVVDVSHEDPEVKFNWYVDGVEVHNAKTKPREEQY | |
| | GSTYRVVSVLTVLHQDWLNGKEYKCKVSNKALPAPIE | |
| | KTISKAKGQPREPQVYTLPPSRDELTKNQVSLSCAVKG | |
| | FYPSDIAVEWESNGQPENNYKTTPPVLDSDGSFFLVSK | |
| | LTVDKSRWQQGNVFSCSVMHEALHNHYTQKSLSLSPG | |
| | K | |
| mAb2.10-HC | ELQLQESGPGLVKPSETLSLTCTVSGGSISDSSYYWGWI | 714 |
| (hole) | RQPPGKGLEWIGSIYYTGETYYAPSLKSRVTISVDTSKN | |
| (SEQ ID | QFSLKLSSVTAADTAVYYCARVRYGVGVPRHFDPWG | |
| NO: 235) + | QGTLVTVSSASTKGPSVFPLAPSSKSTSGGTAALGCLV | |
| YTE | KDYFPEPVTVSWNSGALTSGVHTFPAVLQSSGLYSLSS | |
| | VVTVPSSSLGTQTYICNVNHKPSNTKVDKKVEPKSCD | |
| | KTHTCPPCPAPELLGGPSVFLFPPKPKDTYITRETPEVT | |
| | CVVVDVSHEDPEVKFNWYVDGVEVHNAKTKPREEQY | |
| | GSTYRVVSVLTVIHQDWLNGKEYKCKVSNKALPAPIE | |
| | KTISKAKGQPREPQVYTLPPSRDELTKNQVSLSCAVKG | |
| | FYPSDIAVEWESNGQPENNYKTTPPVLDSDGSFFLVSK | |
| | LTVDKSRWQQGNVFSCSVMHEALHNHYTQKSLSLSPG | |
| mAb2.10-HC | ELQLQESGPGLVKPSETLSLTCTVSGGSISDSSYYWGWI | 715 |
| (hole) | RQPPGKGLEWIGSIYYTGETYYAPSLKSRVTISVDTSKN | |
| (SEQ ID | QFSLKLSSVTAADTAVYYCARVRYGVGVPRHFDPWG | |
| NO: 235) + | QGTLVTVSSASTKGPSVFPLAPSSKSTSGGTAALGCLV | |
| YTE + | KDYFPEPVTVSWNSGALTSGVHTFPAVLQSSGLYSLSS | |
| c-term K | VVTVPSSSLGTQTYICNVNHKPSNTKVDKKVEPKSCD | |
| (also | KTHTCPPCPAPELLGGPSVFLFPPKPKDTLYITREPEVT | |
| referred to | CVVVDVSHEDPEVKFNWYVDGVEVHNAKTKPREEQY | |
| as HCαγ32) | GSTYRVVSVLTVLHQDWLNGKEYKCKVSNKALPAPIE | |
| | KTISKAKGQPREPQVYTLPPSRDELTKNQVSLSCAVKG | |
| | FYPSDIAVEWESNGQPENNYKTTPPVLDSDGSFFLVSK | |
| | LTVDKSRWQQGNVFSCSVMHEALHNHYTQKSLSLSPG | |
| | K | |

TABLE 2B
IL-36β (FORMER KNOB)

| | | | | | | Half-Life | | | | | |
|---|---|---|---|---|---|---|---|---|---|---|---|
| | | | | Effectorless/ | | Extension | | | | | |
| | | | | Silencing | | (HLE) | | KiH Mutations (+ Disulfide Bridges) | | | |
| | | | | Mutations | | M428L/ | | | | Hole | |
| | SEQ | | | | L234A/ | N434S | | | | T366S/ | |
| | NO | | | | L235A | (Xencor | | Knob | | L368A/ | |
| Code | ID | Description | Q1E | N297G | (LALA) | LS) | YTE | T366W | S354C | Y407V | Y349C |
| HCβ1 | 752 | Q-LALA-LS- | — | — | Yes | Yes | — | Yes | Yes | — | — |
| | | S354C-Knob | | | | | | | | | |
| HCβ2 | 753 | Q-LALA-LS- | — | — | Yes | Yes | — | — | — | Yes | Yes |
| | | Y349C-Hole | | | | | | | | (inverse) | |
| HCβ3 | 754 | Q-LALA-LS- | — | — | Yes | Yes | — | Yes | — | — | — |
| | | Knob | | | | | | | | | |
| HCβ4 | 755 | Q-LALA-LS- | — | — | Yes | Yes | — | — | — | Yes | — |
| | | Hole | | | | | | | | (inverse) | |
| HCβ5 | 756 | Q-LALA- | — | — | Yes | — | Yes | Yes | Yes | — | — |
| | | YTE-S354C- | | | | | | | | | |
| | | Knob | | | | | | | | | |
| HCβ6 | 757 | Q-LALA- | — | — | Yes | — | Yes | — | — | Yes | Yes |
| | | YTE-Y349C- | | | | | | | | (inverse) | |
| | | Hole | | | | | | | | | |
| HCβ7 | 758 | Q-LALA- | — | — | Yes | — | Yes | Yes | — | — | — |
| | | YTE-Knob | | | | | | | | | |
| HCβ8 | 759 | Q-LALA- | — | — | Yes | — | Yes | — | — | Yes | — |
| | | YTE-Hole | | | | | | | | (inverse) | |
| HCβ9 | 760 | Q-N297G- | — | Yes | — | Yes | — | Yes | Yes | — | — |
| | | LS-S354C- | | | | | | | | | |
| | | Knob | | | | | | | | | |
| HCβ10 | 761 | Q-N297G- | — | Yes | — | Yes | — | — | — | Yes | Yes |
| | | LS-Y349C- | | | | | | | | (inverse) | |
| | | Hole | | | | | | | | | |
| HCβ11 | 762 | Q-N297G- | — | Yes | — | Yes | — | Yes | — | — | — |
| | | LS-Knob | | | | | | | | | |
| HCβ12 | 763 | Q-N297G- | — | Yes | — | Yes | — | — | — | Yes | — |
| | | LS-Hole | | | | | | | | (inverse) | |
| HCβ13 | 764 | Q-N297G- | — | Yes | — | — | Yes | Yes | Yes | — | — |
| | | YTE-S354C- | | | | | | | | | |
| | | Knob | | | | | | | | | |
| HCβ14 | 765 | Q-N297G- | — | Yes | — | — | Yes | — | — | Yes | Yes |
| | | YTE-Y349C- | | | | | | | | (inverse) | |
| | | Hole | | | | | | | | | |
| HCβ15 | 766 | Q-N297G- | — | Yes | — | — | Yes | Yes | — | — | — |
| | | YTE-Knob | | | | | | | | | |
| HCβ16 | 767 | Q-N297G- | — | Yes | — | — | Yes | — | — | Yes | — |
| | | YTE-Hole | | | | | | | | (inverse) | |
| HCβ17 | 768 | E-LALA-LS- | Yes | — | Yes | Yes | — | Yes | Yes | — | — |
| | | S354C-Knob | | | | | | | | | |
| HCβ18 | 769 | E-LALA-LS- | Yes | — | Yes | Yes | — | — | — | Yes | Yes |
| | | Y349C-Hole | | | | | | | | (inverse) | |
| HCβ19 | 770 | E-LALA-LS- | Yes | — | Yes | Yes | — | Yes | — | — | — |
| | | Knob | | | | | | | | | |
| HCβ20 | 771 | E-LALA-LS- | Yes | — | Yes | Yes | — | — | — | Yes | — |
| | | Hole | | | | | | | | (inverse) | |
| HCβ21 | 772 | E-LALA- | Yes | — | Yes | — | Yes | Yes | Yes | — | — |
| | | YTE-S354C- | | | | | | | | | |
| | | Knob | | | | | | | | | |
| HCβ22 | 773 | E-LALA- | Yes | — | Yes | — | Yes | — | — | Yes | Yes |
| | | YTE-Y349C- | | | | | | | | (inverse) | |
| | | Hole | | | | | | | | | |
| HCβ23 | 774 | E-LALA- | Yes | — | Yes | — | Yes | Yes | — | — | — |
| | | YTE-Knob | | | | | | | | | |
| HCβ24 | 775 | E-LALA- | Yes | — | Yes | — | Yes | — | — | Yes | — |
| | | YTE-Hole | | | | | | | | (inverse) | |
| HCβ25 | 776 | E-N297G- | Yes | Yes | — | Yes | — | Yes | Yes | — | — |
| | | LS-S354C- | | | | | | | | | |
| | | Knob | | | | | | | | | |
| HCβ26 | 777 | E-N297G- | Yes | Yes | — | Yes | — | — | — | Yes | Yes |
| | | LS-Y349C- | | | | | | | | (inverse) | |
| | | Hole | | | | | | | | | |
| HCβ27 | 778 | E-N297G- | Yes | Yes | — | Yes | — | Yes | — | — | — |
| | | LS-Knob | | | | | | | | | |
| HCβ28 | 779 | E-N297G- | Yes | Yes | — | Yes | — | — | — | Yes | — |
| | | LS-Hole | | | | | | | | (inverse) | |
| HCβ29 | 780 | E-N297G- | Yes | Yes | — | — | Yes | Yes | Yes | — | — |
| | | YTE-S354C- | | | | | | | | | |
| | | Knob | | | | | | | | | |
| HCβ30 | 781 | E-N297G- | Yes | Yes | — | — | Yes | — | — | Yes | Yes |
| | | YTE-Y349C- | | | | | | | | (inverse) | |
| | | Hole | | | | | | | | | |
| HCβ33 | 782 | Q-LALA- | — | — | Yes | — | — | Yes | Yes | — | — |
| | | S354C-Knob | | | | | | | | | |
| HCβ34 | 783 | Q-LALA- | — | — | Yes | — | — | — | — | Yes | Yes |
| | | Y349C-Hole | | | | | | | | (inverse) | |
| HCβ35 | 784 | Q-LALA- | — | — | Yes | — | — | Yes | — | — | — |
| | | Knob | | | | | | | | | |
| HCβ36 | 785 | Q-LALA- | — | — | Yes | — | — | — | — | Yes | — |
| | | Hole | | | | | | | | (inverse) | |
| HCβ37 | 786 | E-LALA- | Yes | — | Yes | — | — | Yes | Yes | — | — |
| | | S354C-Knob | | | | | | | | | |
| HCβ38 | 787 | E-LALA- | Yes | — | Yes | — | — | — | — | Yes | Yes |
| | | Y349C-Hole | | | | | | | | (inverse) | |
| HCβ39 | 788 | E-LALA- | Yes | — | Yes | — | — | Yes | — | — | — |
| | | Knob | | | | | | | | | |
| HCβ40 | 789 | E-LALA- | Yes | — | Yes | — | — | — | — | Yes | — |
| | | Hole | | | | | | | | (inverse) | |

TABLE 2C
IL-36αγ(FORMER HOLE)

| | | | | | | Half-Life | | | | | |
|---|---|---|---|---|---|---|---|---|---|---|---|
| | | | | Effectorless/ | | Extension | | | | | |
| | | | | Silencing | | (HLE) | | KiH Mutations (+ Disulfide Bridges) | | | |
| | | | | Mutations | | M428L/ | | | | Hole | |
| | SEQ | | | | L234A/ | N434S | | | | T366S/ | |
| | NO | | | | L235A | (Xencor | | Knob | | L368A/ | |
| Code | ID | Description | Q1E | N297G | (LALA) | LS) | YTE | T366W | S354C | Y407V | Y349C |
| HCαγ1 | 790 | QLALA-LS- | — | — | Yes | Yes | — | Yes | Yes | — | — |
| | | S354C-Knob | | | | | | (inverse) | | | |
| HCαγ2 | 791 | QLALA-LS- | — | — | Yes | Yes | — | — | — | Yes | Yes |
| | | Y349C-Hole | | | | | | | | | |
| HCαγ3 | 792 | QLALA-LS- | — | — | Yes | Yes | — | Yes | — | — | — |
| | | Knob | | | | | | (inverse) | | | |
| HCαγ4 | 793 | QLALA-LS- | — | — | Yes | Yes | — | — | — | Yes | — |
| | | Hole | | | | | | | | | |
| HCαγ5 | 794 | Q-LALA-YTE- | — | — | Yes | — | Yes | Yes | Yes | — | — |
| | | S354C-Knob | | | | | | (inverse) | | | |
| HCαγ6 | 795 | Q-LALA-YTE- | — | — | Yes | — | Yes | — | — | Yes | Yes |
| | | Y349C-Hole | | | | | | | | | |
| HCαγ7 | 796 | Q-LALA-YTE- | — | — | Yes | — | Yes | Yes | — | — | — |
| | | Knob | | | | | | (inverse) | | | |
| HCαγ8 | 797 | Q-LALA-YTE- | — | — | Yes | — | Yes | — | — | Yes | — |
| | | Hole | | | | | | | | | |
| HCαγ9 | 798 | Q-N297G-LS- | — | Yes | — | Yes | — | Yes | Yes | — | — |
| | | S354C-Knob | | | | | | (inverse) | | | |
| HCαγ10 | 799 | Q-N297G-LS- | — | Yes | — | Yes | — | — | — | Yes | Yes |
| | | Y349C-Hole | | | | | | | | | |
| HCαγ11 | 800 | Q-N297G-LS- | — | Yes | — | Yes | — | Yes | — | — | — |
| | | Knob | | | | | | (inverse) | | | |
| HCαγ12 | 801 | Q-N297G-LS- | — | Yes | — | Yes | — | — | — | Yes | — |
| | | Hole | | | | | | | | | |
| HCαγ13 | 802 | Q-N297G- | — | Yes | — | — | Yes | Yes | Yes | — | — |
| | | YTE-S354C- | | | | | | (inverse) | | | |
| | | Knob | | | | | | | | | |
| HCαγ14 | 803 | Q-N297G- | — | Yes | — | — | Yes | — | — | Yes | Yes |
| | | YTE-Y349C- | | | | | | | | | |
| | | Hole | | | | | | | | | |
| HCαγ15 | 804 | Q-N297G- | — | Yes | — | — | Yes | Yes | — | — | — |
| | | YTE-Knob | | | | | | (inverse) | | | |
| HCαγ16 | 805 | Q-N297G- | — | Yes | — | — | Yes | — | — | Yes | — |
| | | YTE-Hole | | | | | | | | | |
| HCαγ17 | 806 | E-LALA-LS- | Yes | — | Yes | Yes | — | Yes | Yes | — | — |
| | | S354C-Knob | | | | | | (inverse) | | | |
| HCαγ18 | 807 | E-LALA-LS- | Yes | — | Yes | Yes | — | — | — | Yes | Yes |
| | | Y349C-Hole | | | | | | | | | |
| HCαγ19 | 808 | E-LALA-LS- | Yes | — | Yes | Yes | — | Yes | — | — | — |
| | | Knob | | | | | | (inverse) | | | |
| HCαγ20 | 809 | E-LALA-LS- | Yes | — | Yes | Yes | — | — | — | Yes | — |
| | | Hole | | | | | | | | | |
| HCαγ21 | 810 | E-LALA-YTE- | Yes | — | Yes | — | Yes | Yes | Yes | — | — |
| | | S354C-Knob | | | | | | (inverse) | | | |
| HCαγ22 | 811 | E-LALA-YTE- | Yes | — | Yes | — | Yes | — | — | Yes | Yes |
| | | Y349C-Hole | | | | | | | | | |
| HCαγ23 | 812 | E-LALA-YTE- | Yes | — | Yes | — | Yes | Yes | — | — | — |
| | | Knob | | | | | | (inverse) | | | |
| HCαγ24 | 813 | E-LALA-YTE- | Yes | — | Yes | — | Yes | — | — | Yes | — |
| | | Hole | | | | | | | | | |
| HCαγ25 | 814 | E-N297G-LS- | Yes | Yes | — | Yes | — | Yes | Yes | — | — |
| | | S354C-Knob | | | | | | (inverse) | | | |
| HCαγ26 | 815 | E-N297G-LS- | Yes | Yes | — | Yes | — | — | — | Yes | Yes |
| | | Y349C-Hole | | | | | | | | | |
| HCαγ27 | 816 | E-N297G-LS- | Yes | Yes | — | Yes | — | Yes | — | — | — |
| | | Knob | | | | | | (inverse) | | | |
| HCαγ28 | 817 | E-N297G-LS- | Yes | Yes | — | Yes | — | — | — | Yes | — |
| | | Hole | | | | | | | | | |
| HCαγ29 | 818 | E-N297G-YTE- | Yes | Yes | — | — | Yes | Yes | Yes | — | — |
| | | S354C-Knob | | | | | | (inverse) | | | |
| HCαγ30 | 819 | E-N297G-YTE- | Yes | Yes | — | — | Yes | — | — | Yes | Yes |
| | | Y349C-Hole | | | | | | | | | |
| HCαγ33 | 820 | Q-LALA- | — | — | Yes | — | — | Yes | Yes | — | — |
| | | S354C-Knob | | | | | | (inverse) | | | |
| HCαγ34 | 821 | QLALA- | — | — | Yes | — | — | — | — | Yes | Yes |
| | | Y349C-Hole | | | | | | | | | |
| HCαγ35 | 822 | Q-LALA-Knob | — | — | Yes | — | — | Yes | — | — | — |
| | | | | | | | | (inverse) | | | |
| HCαγ36 | 823 | Q-LALA-Hole | — | — | Yes | — | — | — | — | Yes | — |
| HCαγ7 | 824 | E-LALA- | Yes | — | Yes | — | — | Yes | Yes | — | — |
| | | S354C-Knob | | | | | | (inverse) | | | |
| HCαγ38 | 825 | E-LALA- | Yes | — | Yes | — | — | — | — | Yes | Yes |
| | | Y349C-Hole | | | | | | | | | |
| HCαγ39 | 826 | E-LALA-Knob | Yes | — | Yes | — | — | Yes | — | — | — |
| | | | | | | | | (inverse) | | | |
| HCαγ40 | 827 | E-LALA-Hole | Yes | — | Yes | — | — | — | — | Yes | — |

TABLE 2D

| Example | Antibody | Description | SEQ ID Nos |
|---|---|---|---|
| 1 | LC2-HCβ1-HCαγ2 | Q-LALA-LS-S354/Y349-KiH | 752/791 |
| 2 | LC2-HCβ2-HCαγ1 | Q-LALA-LS-S354/Y349-HiK (inverse) | 753/790 |
| 3 | LC2-HCβ3-HCαγ4 | Q-LALA-LS-KiH | 754/793 |
| 4 | LC2-HCβ4-HCαγ3 | Q-LALA-LS-HiK (inverse) | 755/792 |
| 5 | LC2-HCβ5-HCαγ6 | Q-LALA-YTE-S354/Y349-KiH | 756/795 |
| 6 | LC2-HCβ6-HCαγ5 | Q-LALA-YTE-S354/Y349-HiK (inverse) | 757/794 |
| 7 | LC2-HCβ7-HCαγ8 | Q-LALA-YTE-KiH | 758/797 |
| 8 | LC2-HCβ8-HCαγ7 | Q-LALA-YTE-HiK (inverse) | 759/796 |
| 9 | LC2-HCβ9-HCαγ10 | Q-N297G-LS-S354/Y349-KiH | 760/799 |
| 10 | LC2-HCβ10-HCαγ9 | Q-N297G-LS-S354/Y349-HiK (inverse) | 761/798 |
| 11 | LC2-HCβ11-HCαγ12 | Q-N297G-LS-KiH | 762/801 |
| 12 | LC2-HCβ12-HCαγ11 | Q-N297G-LS-HiK (inverse) | 763/800 |
| 13 | LC2-HCβ13-HCαγ14 | Q-N297G-YTE-S354/Y349-KiH | 764/803 |
| 14 | LC2-HCβ14-HCαγ13 | Q-N297G-YTE-S354/Y349-HiK (inverse) | 765/802 |
| 15 | LC2-HCβ15-HCαγ16 | Q-N297G-YTE-KiH | 766/805 |
| 16 | LC2-HCβ16-HCαγ15 | Q-N297G-YTE-HiK (inverse) | 767/804 |
| 17 | LC1-HCβ17-HCαγ18 | E-LALA-LS-S354/Y349-KiH | 768/807 |
| 18 | LC1-HCβ18-HCαγ17 | E-LALA-LS-S354/Y349-HiK (inverse) | 769/806 |
| 19 | LC1-HCβ19-HCαγ20 | E-LALA-LS-KiH | 770/809 |
| 20 | LC1-HCβ20-HCαγ19 | E-LALA-LS-HiK (inverse) | 771/808 |
| 21 | LC1-HCβ21-HCαγ22 | E-LALA-YTE-S354/Y349-KiH | 772/811 |
| 22 | LC1-HCβ22-HCαγ21 | E-LALA-YTE-S354/Y349-HiK (inverse) | 773/810 |
| 23 | LC1-HCβ23-HCαγ24 | E-LALA-YTE-KiH | 774/813 |
| 24 | LC1-HCβ24-HCαγ23 | E-LALA-YTE-HiK (inverse) | 775/812 |
| 25 | LC1-HCβ25-HCαγ26 | E-N297G-LS-S354/Y349-KiH | 776/815 |
| 26 | LC1-HCβ26-HCαγ25 | E-N297G-LS-S354/Y349-HiK (inverse) | 777/814 |
| 27 | LC1-HCβ27-HCαγ28 | E-N297G-LS-KiH | 778/817 |
| 28 | LC1-HCβ28-HCαγ27 | E-N297G-LS-HiK (inverse) | 779/816 |
| 29 | LC1-HCβ29-HCαγ30 | E-N297G-YTE-S354/Y349-KiH | 780/819 |
| 30 | LC1-HCβ30-HCαγ29 | E-N297G-YTE-S354/Y349-HiK (inverse) | 781/818 |
| 31 | LC1-HCβ31-HCαγ32 | E-N297G-YTE-KiH | 586/715 |
| 32 | LC1-HCβ32-HCαγ31 | E-N297G-YTE-HiK (inverse) | 588/712 |
| 33 | LC2-HCβ33-HCαγ34 | Q-LALA-S354/Y349-KiH | 782/821 |
| 34 | LC2-HCβ34-HCαγ33 | Q-LALA-S354/Y349-HiK (inverse) | 783/820 |
| 35 | LC2-HCβ35-HCαγ36 | Q-LALA KiH | 784/823 |
| 36 | LC2-HCβ36-HCαγ35 | Q-LALA HiK (inverse) | 785/822 |
| 37 | LC1-HCβ37-HCαγ38 | E-LALA-S354/Y349-KiH | 786/825 |
| 38 | LC1-HCβ38-HCαγ37 | E-LALA-S354/Y349-HiK (inverse) | 787/824 |
| 39 | LC1-HCβ39-HCαγ40 | E-LALA KiH | 788/827 |
| 40 | LC1-HCβ40-HCαγ39 | E-LALA HiK (inverse) | 789/826 |

### 1. Binding Affinity and Cell-Signaling Inhibition of Anti-IL-36 Antibodies

[0128] In some embodiments, the anti-IL-36 antibodies provided herein have an equilibrium dissociation constant (K_{D}) for binding the human cytokines, hu-IL-36α˜, hu-IL-36β, and/or hu-IL-36γ of <100 nM, <10 nM, <1 nM, <0.1 nM, <0.01 nM, or <0.001 nM (e.g., 10⁻⁸ M or less, from 10⁻⁸ M to 10⁻¹³ M, e.g., from 10⁻⁹ M to 10⁻¹³ M). More specifically, in some embodiments, the anti-IL-36 antibodies of the present disclosure bind to hu-IL-36α˜, hu-IL-36β, and/or hu-IL-36γ with a binding affinity of 1×10⁻⁸ M or less, 1×10⁻⁹ M or less, 1×10⁻¹⁰ M or less, or 1×10⁻¹¹ M or less. In some embodiments, the binding affinity is measured as the equilibrium dissociation constant (K_{D}) for binding to the hu-IL-36α˜, hu-IL-36β, or hu-IL-36γ polypeptide constructs of SEQ ID NO: 1, 2, and 3, respectively. In one embodiment, an antibody of the invention may display a K_{D} of less than about 25 nM, less than about 20 nM, less than about 15 nM, less than about 10 nM, less than about 5 nM, less than about 1 nM, less than about 500 μM, less than about 400 μM, less than about 300 μM, less than about 200 μM, less than about 100 μM, less than about 90 μM, less than about 80 μM, less than about 70 μM, less than about 60 μM, less than about 50 μM, less than about 40 μM, less than about 30 μM, less than about 20 μM, less than about 10 μM, less than about 5 μM, less than about 4 μM, less than about 2 μM, less than about 1 μM, less than about 0.5 μM, less than about 0.2 μM, less than about 0.1 μM, or less than about 0.05 μM, It may, for instance, have such values for hu-IL-36α, hu-IL-36β, and/or hu-IL-36γ. It may, for instance have such a value for hu-IL-36β. It may have such values, for instance for hu-IL-36α, and/or hu-IL-36γ. In one embodiment, where the antibody is a bispecific antibody it may display such K_{D} values. In another embodiment, it may be that the equivalent monospecific antibody to one of the specificities of the bispecific antibody may display such a K_{D} value. In another embodiment, it may be that the equivalent monospecific antibody for both of the specificities of the bispecific antibody displays such a K_{D} value. In one preferred embodiment the K_{D} value is one determined by surface plasmon resonance assay, for instance at 25° C. and/or at 37° C. Generally, binding affinity of a ligand to its receptor can be determined using any of a variety of assays and expressed in terms of a variety of quantitative values. Specific IL-36 binding assays useful in determining affinity of the antibodies are disclosed in the Examples herein. Additionally, antigen binding assays are known in the art and can be used herein including without limitation any direct or competitive binding assays using techniques such as western blots, radioimmunoassays, enzyme-linked immunoabsorbent assay (ELISA), “sandwich” immunoassays, surface plasmon resonance based assay (such as the BIAcore assay as described in WO2005/012359), immunoprecipitation assays, fluorescent immunoassays, and protein A immunoassays. In one preferred embodiment antigen binding is measured using “surface plasmon resonance,” for example using the BIAcore™ system (Biacore Life Sciences division of GE Healthcare, Piscataway, N.J.).

[0129] In some embodiments, the binding affinity is expressed as K_{D} values and reflects intrinsic binding affinity (e.g., with minimized avidity effects). The anti-IL-36 antibodies of the present disclosure exhibit strong binding affinities for the hu-IL-36α, hu-IL-36β, and/or hu-IL-36γ polypeptide constructs of SEQ ID NO: 1, 2, and 3, respectively, for example, exhibiting K_{D} values of between 10 nM and 1 μM.

[0130] In some embodiments, the anti-IL-36 antibodies provided herein decrease, inhibit, and/or fully-block intracellular signaling by IL-36-mediated pathways, specifically, the signaling pathways that are stimulated by binding to IL-36R of IL-36α, IL-36β, and/or IL-36γ. The ability of the antibodies to inhibit these IL-36-mediated signaling pathways can be assayed in vitro using known cell-based blocking assays including, the HEK-BLUE™ reporter cell assays and the primary cell-based blocking assays described in the Examples of the present disclosure. In some instances, IL-8 expression may be employed as an indicator of signaling through an IL-36-mediated pathway, including e.g., where reduced IL-8 levels indicate blocking of one or more IL-36-mediated pathways.

[0131] In some embodiments, the ability of the antibody to decrease, inhibit, and/or fully-block IL-36 stimulated signaling is determined as IC₅₀ of the antibody using a reporter cell-based blocking assay with the agonist cytokine(s) IL-36α, IL-36β, and/or IL-36γ at a concentration of about EC₅₀. The agonist EC₅₀ often can only be estimated prior to the assay and is determined after the assay is completed using nonlinear regression analysis of the data. In such assays, a value of about EC₅₀ typically will be in the range of from EC₄₀₋₄₅ to EC₅₅₋₆₀.

[0132] Accordingly, in some embodiments, the IL-36 antibodies of the present disclosure are characterized by one or more of the following functional properties based on the ability to decrease, inhibit, and/or fully-block intracellular signaling by IL-36-mediated pathways.

[0133] In some embodiments of the anti-IL-36 antibody, the antibody decreases a signal stimulated by (or initiated by) any of IL-36α, IL-36β, or IL-36γ, by at least 90%, at least 95%, at least 99%, or 100%. In some embodiments, the decrease in signal can be measured using a cell-based assay. One of ordinary skill can select any of the known cell-based assays known for use in determining inhibition of cell-signaling of an IL-36 stimulated pathway. Generally, the anti-IL-36 antibodies of the present disclosure decrease the IL-36-mediated intracellular signal initiated by binding of an agonist cytokine IL-36α, IL-36β, or IL-36γ at a concentration of about EC₅₀ (e.g., EC₄₀ to EC₆₀) with an IC₅₀ value for the antibody of 10 nM or less, 5 nM or less, or 1 nM.

[0134] In some embodiments the anti-IL-36 antibody decreases an IL-36 stimulated signal by at least 95%, or at least 99%; optionally, wherein the IL-36 stimulated signal is stimulated by an agonist cytokine selected from IL-36α, IL-36β, and IL-36γ; optionally, wherein at an agonist cytokine concentration of about EC₅₀ the antibody has an IC₅₀ of 10 nM or less, 5 nM or less, or 1 nM or less.

[0135] In some embodiments the anti-IL-36 antibody decreases an intracellular signal initiated by one or more of IL-36α, IL-36β, and IL-36γ agonist binding to its cognate receptor by at least 90%, at least 95%, at least 99%, or 100%.

[0136] In some embodiments the anti-IL-36 antibody inhibits IL-36α, IL-36β, and/or IL-36γ stimulated release of IL-8 from primary human keratinocyte cells and/or HaCAT cells; optionally, wherein at an IL-36α, IL-36β, and/or IL-36γ concentration of about EC₅₀ the antibody has an IC₅₀ of 10 nM or less, 5 nM or less, or 1 nM or less.

### 2. Antibody Fragments

[0137] In some embodiments, the anti-IL-36 antibody of the present disclosure can be an antibody fragment. Antibody fragments useful with the binding determinants the present disclosure include, but are not limited to, Fab, Fab′, Fab′-SH, F(ab′)2, Fv, monovalent, one-armed (or single-armed) antibodies, scFv fragments, and other fragments described herein and known in the art. For a review of various antibody fragments, see e.g., Hudson et al. Nat. Med. 9: 129-134 (2003). For a review of scFv fragments, see, e.g., Pluckthun, in The Pharmacology of Monoclonal Antibodies, vol. 113, Rosenburg and Moore eds., (Springer-Verlag, New York), pp. 269-315 (1994); see also WO93/16185; and U.S. Pat. Nos. 5,571,894 and 5,587,458. For a description of Fab and F(ab′)₂ fragments comprising salvage receptor binding epitope residues and having increased in vivo half-life, see U.S. Pat. No. 5,869,046. Other monovalent antibody forms are described in, e.g., WO2007/048037, WO2008/145137, WO2008/145138, and WO2007/059782. Monovalent, single-armed antibodies are described, e.g., in WO2005/063816. Diabodies are antibody fragments with two antigen-binding sites that may be bivalent or bispecific (see e.g., EP0404097; WO93/01161; Hudson et al., Nat. Med. 9: 129-134 (2003); and Hollinger et al., Proc. Natl. Acad. Sci. USA 90: 6444-6448 (1993)).

[0138] In some embodiments, the antibody fragments are single-domain antibodies which comprise all or a portion of the heavy chain variable domain or all or a portion of the light chain variable domain of an antibody. In some embodiments, a single-domain antibody is a human single-domain antibody (Domantis, Inc., Waltham, Mass.; see, e.g., U.S. Pat. No. 6,248,516).

[0139] Antibody fragments can be made by various techniques, including but not limited to proteolytic digestion of an intact antibody as well as production by recombinant host cells (e.g., E. coli or phage), as described herein.

[0140] It is contemplated that any of the anti-IL-36 antibodies of the present invention can be prepared as antibody fragments using the methods and techniques known in the art and/or described herein. For example, the preparation and analysis of Fab versions of various anti-IL-36 antibodies of the present disclosure are described in the Examples below. In a particularly preferred embodiment of the invention though the antibody provided is a full length antibody and is not a fragment.

### 3. Chimeric and Humanized Antibodies

[0141] In some embodiments, the anti-IL-36 antibody of the present disclosure can be a chimeric antibody. (See e.g., chimeric antibodies as described in U.S. Pat. No. 4,816,567; and Morrison et al., Proc. Natl. Acad. Sci. USA, 81:6851-6855 (1984)). In one embodiment, a chimeric antibody comprises a non-human variable region (e.g., a variable region derived from a mouse, rat, hamster, rabbit, or non-human primate, such as a monkey) and a human constant region. In some embodiments, a chimeric antibody is a “class switched” antibody in which the class or subclass has been changed from that of the parent antibody. It is contemplated that chimeric antibodies can include antigen-binding fragments thereof.

[0142] In some embodiments, the anti-IL-36 antibody of the present disclosure is a humanized antibody. Typically, a non-human antibody is humanized to reduce immunogenicity to humans, while retaining the specificity and affinity of the parental non-human antibody. Generally, a humanized antibody comprises one or more variable domains in which HVRs, e.g., CDRs, (or portions thereof) are derived from a non-human antibody, and FRs (or portions thereof) are derived from human antibody sequences. A humanized antibody optionally will also comprise at least a portion of a human constant region. In some embodiments, some FR residues in a humanized antibody are substituted with corresponding residues from a non-human antibody (e.g., the antibody from which the CDR residues are derived) to restore or improve antibody specificity or affinity.

[0143] Humanized antibodies and methods of making them are reviewed, e.g., in Almagro and Fransson, Front. Biosci. 13: 1619-1633 (2008), and are further described, e.g., in Riechmann et al., Nature 332:323-329 (1988); Queen et al., Proc. Nat'l Acad. Sci. USA 86: 10029-10033 (1989); U.S. Pat. Nos. 5,821,337, 7,527,791, 6,982,321, and 7,087,409; Kashmiri et al, Methods 36:25-34 (2005) (describing SDR (a-HVR) grafting); Padlan, Mol. Immunol. 28:489-498 (1991) (describing “resurfacing”); Dall'Acqua et al., Methods 36:43-60 (2005) (describing “FR shuffling”); and Osbourn et al., Methods 36:61-68 (2005) and Klimka et al., Br. J. Cancer, 83: 252-260 (2000) (describing the “guided selection” approach to FR shuffling).

[0144] Human framework regions that are useful for humanization include but are not limited to: framework regions selected using the “best-fit” method (see, e.g., Sims et al. J. Immunol. 151:2296 (1993)); framework regions derived from the consensus sequence of human antibodies of a particular subgroup of light or heavy chain variable regions (see, e.g., Carter et al. Proc. Natl. Acad. Sci. USA, 89:4285 (1992); and Presta et al. J. Immunol, 151:2623 (1993)); human mature (somatically mutated) framework regions or human germline framework regions (see, e.g., Almagro and Fransson, Front. Biosci. 13: 1619-1633 (2008)); and framework regions derived from screening FR libraries (see, e.g., Baca et al., J. Biol. Chem. 272: 10678-10684 (1997) and Rosok et al., J. Biol. Chem. 271: 22611-22618 (1996)).

[0145] It is contemplated that any of the anti-IL-36 antibodies of the present invention can be prepared as humanized antibodies using the methods and techniques known in the art and/or described herein.

### 4. Human Antibodies

[0146] In some embodiments, the anti-IL-36 antibody of the present disclosure can be a human antibody. Human antibodies can be produced using various techniques known in the art. Human antibodies are described generally in van Dijk and van de Winkel, Curr. Opin. Pharmacol. 5: 368-74 (2001) and Lonberg, Curr. Opin. Immunol. 20:450-459 (2008). Human antibodies may be prepared by administering an immunogen to a transgenic animal that has been modified to produce intact human antibodies or intact antibodies with human variable regions in response to antigenic challenge. Such animals typically contain all or a portion of the human immunoglobulin loci, which replace the endogenous immunoglobulin loci, or which are present extrachromosomally or integrated randomly into the animal's chromosomes. In such transgenic mice, the endogenous immunoglobulin loci have generally been inactivated. For review of methods for obtaining human antibodies from transgenic animals, see Lonberg, Nat. Biotech. 23:1117-1125 (2005). See also, e.g., XENOMOUSE™ technology in U.S. Pat. Nos. 6,075,181 and 6,150,584; HUMAB® technology in U.S. Pat. No. 5,770,429; K-M MOUSE® technology in U.S. Pat. No. 7,041,870; and VELOCIMOUSE® technology in U.S. Pat. Appl. Pub. No. US 2007/0061900). Human variable regions from intact antibodies generated by such animals may be further modified, e.g., by combining with a different human constant region.

[0147] Human antibodies can also be made by hybridoma-based methods. Human myeloma and mouse-human heteromyeloma cell lines for the production of human monoclonal antibodies have been described. See, e.g., Kozbor J. Immunol, 133: 3001 (1984); Brodeur et al., Monoclonal Antibody Production Techniques and Applications, pp. 51-63 (Marcel Dekker, Inc., New York, 1987); and Boerner et al., J. Immunol., 147: 86 (1991). Human antibodies generated via human B-cell hybridoma technology are also described in Li et al., Proc. Nat'l. Acad. Sci. USA, 103:3557-3562 (2006). Additional methods describing production of monoclonal human IgM antibodies from hybridoma cell lines include those described in e.g., U.S. Pat. No. 7,189,826. Human hybridoma technology (i.e., the trioma technique) is described in e.g., Vollmers et al., Histology and Histopathology, 20(3):927-937 (2005) and Vollmers et al., and Methods and Findings in Experimental and Clinical Pharmacology, 27(3): 185-91 (2005).

[0148] Human antibodies may also be generated by isolating Fv clone variable domain sequences selected from human-derived phage display libraries. Such variable domain sequences may then be combined with a desired human constant domain. Techniques for selecting human antibodies from antibody libraries are described below.

[0149] It is contemplated that any of the anti-IL-36 antibodies of the present disclosure can be prepared as human antibodies using the methods and techniques known in the art and/or described herein, including in the Examples.

### 5. Library-Derived Antibodies

[0150] In some embodiments, the anti-IL-36 antibody of the present invention may be isolated by screening combinatorial libraries for antibodies with the desired activity or activities. For example, a method may be used to generate a phage display library and the library may be screened for antibodies possessing the desired binding characteristics. The use of phage display for preparation of affinity matured variants of the humanized version of the anti-IL-36 antibody of the present invention are described in the Examples disclosed herein. Other methods for producing such library-derived antibodies can be found in e.g., Hoogenboom et al., Methods in Molecular Biology 178: 1-37 (O'Brien et al., ed., Human Press, Totowa, N.J., 2001); McCafferty et al., Nature 348:552-554; Clackson et al., Nature 352: 624-628 (1991); Marks et al., J. Mol. Biol. 222: 581-597 (1992); Marks and Bradbury, m Methods in Molecular Biology 248: 161-175 (Lo, ed., Human Press, Totowa, N.J., 2003); Sidhu et al., J. Mol. Biol. 338(2): 299-310 (2004); Lee et al., J. Mol. Biol. 340(5): 1073-1093 (2004); Fellouse, Proc. Natl. Acad. Sci. USA 101(34): 12467-12472 (2004); and Lee et al., J. Immunol. Methods 284(1-2): 1 19-132(2004).

[0151] It is contemplated that combinatorial library screening can be used to generate variants of the anti-IL-36 antibodies of the present disclosure using and/or adapting methods and techniques known in the art with those described herein. For example, the use of phage display library generation and screening to prepare a wide-range of affinity matured variants of the anti-IL-36 antibodies of the present disclosure is described in the Examples.

[0152] Where the antibody provided is a bispecific antibody, it may be that screening is performed to identity a light chain that is able to act as a common light chain for both heavy chains. For instance, screening may be performed with the light chain of one specificity to see if it able to form an antigen binding site with the other heavy chain and retain the antigen specificity for that heavy chain. It may be that variants of the second heavy chain are screened to identify if they are better able to pair with the light chain without loss of binding specificity and/or activity. Techniques such as affinity maturation may be employed to generate variant sequences with desired properties.

### 6. Multispecific Antibodies

[0153] In some embodiments, the anti-IL-36 antibody of the present disclosure is a multispecific antibody, e.g., a trispecific or bispecific antibody. In an especially preferred embodiment of the invention, the antibody is a bispecific antibody. In any of the embodiments disclosed herein, unless otherwise stated, the antibody provided may be a bispecific antibody.

[0154] In some embodiments, the multispecific antibody is a monoclonal antibody having at least two different binding sites, each with a binding specificity for a different antigen, at least one of which specifically binds IL-36. Generally, it is contemplated that the binding specificities of any of the anti-IL-36 antibodies disclosed herein can be incorporated into a multispecific antibody useful for treating an IL-36 mediated disease. For example, in some embodiments, at least one of binding site of multispecific antibody specifically binds IL-36 (e.g., IL-36α, IL-36β, and/or IL-36γ) and another binding site of the multispecific antibody binds to a different antigen related to treatment of an IL-36 mediated disease.

[0155] In some embodiments, as described elsewhere herein, a multispecific antibody is contemplated that binds to each of human IL-36α, IL-36β, and IL-36γ with a high binding affinity (e.g., 3 nM or less). Such binding affinities can be measured as the equilibrium dissociation constant (K_{D}) to a hu-IL-36α of SEQ ID NO:1, a hu-IL-36β of SEQ ID NO:2, and a hu-IL-36γ of SEQ ID NO:3. It is further contemplated, that in some embodiments, the multispecific antibody can comprise a specificity for IL-36α and/or IL-36γ in one arm, and a specificity for IL-36β in the other arm.

[0156] Techniques for making multispecific antibodies include, but are not limited to, recombinant co-expression of two immunoglobulin heavy chain-light chain pairs having different specificities (see e.g., Milstein and Cuello, Nature 305: 537 (1983), WO 93/08829, and Traunecker et al., EMBOJ. 10: 3655 (1991)). “Knob-in-hole” engineering can also be used (see, e.g., U.S. Pat. No. 5,731,168).

[0157] Multispecific antibodies can also be made by engineering “electrostatic steering” effects that favor formation of Fc-heterodimeric antibody molecules rather than homodimers (WO 2009/089004A1); cross-linking two or more antibodies or fragments (see, e.g., U.S. Pat. No. 4,676,980, and Brennan et al., Science, 229: 81 (1985)); using leucine zippers to produce bispecific antibodies (see, e.g., Kostelny et al., J. Immunol, 148(5): 1547-1553 (1992)); using “diabody” technology for making bispecific antibody fragments (see, e.g., Hollinger et al., Proc. Natl. Acad. Sci. USA, 90:6444-6448 (1993)); using single-chain Fv (scFv) dimers (see, e.g., Gruber et al., J. Immunol, 152:5368 (1994)); or tri-specific antibodies (see e.g., Tutt et al., J. Immunol. 147: 60 (1991).

[0158] It is contemplated that any of the anti-IL-36 antibodies of the present invention can be prepared as multispecific antibodies using the methods and techniques known in the art and/or described herein.

[0159] In some embodiments of the present invention, a multispecific IL-36 antibody is contemplated that comprises separate binding specificities for one or more of the distinct IL-36 cytokines, IL-36α, IL-36β, and IL-36γ. For example, the multispecific antibody can bind to IL-36α, IL-36β, and IL-36γ with an affinity of 3 nM or less, and/or decrease an intracellular signal stimulated by IL-36α, IL-36β, and IL-36γ by at least 90%, and/or has an IC₅₀ of 10 nM or less at an IL-36α, IL-36β, and/or IL-36γ concentration of about EC₅₀. As described elsewhere herein, human IL-36 antibodies were isolated having high-affinity for IL-36α and IL-36γ, but lower affinity for IL-36β, and others were isolated having high-affinity for IL-36β, but lower affinity for IL-36α and IL-36γ. These specificities for these different human IL-36 cytokines were affinity matured and combined in a single multispecific IL-36 antibody. Accordingly, in some embodiments, the present disclosure provides a multispecific anti-IL-36 antibody with a target specificity and high affinity (e.g., 1 nM or less) for IL-36α/IL-36γ in one arm, and a target specificity and high affinity (e.g., 1 nM or less) for IL-36β in the other arm. The preparation and use of such a multispecific anti-IL-36 antibody is detailed in the Examples. In one embodiment of the present invention, the antibody provided is a bispecific antibody where one antigen binding site of the antibody has higher specificity for IL-36β in comparison to that for IL-36α/IL-36γ and the other antigen binding site has a higher specificity for IL-36α/IL-36γ in comparison to that for IL-36β.

[0160] Where an antigen is a multispecific antibody, and in particular a bispecific antibody, it may in some embodiments only comprise a single “common” light chain that is capable of pairing with each of the two different heavy chains to form an antigen binding site for one of the specificities.

### 7. Antibody Variants

[0161] In some embodiments, variants of the anti-IL-36 antibody of the present disclosure are also contemplated. For example, antibodies with improved binding affinity and/or other biological properties of the antibody may be prepared by introducing appropriate modifications into the nucleotide sequence encoding the antibody, or by peptide synthesis. Such modifications include, for example, deletions from, and/or insertions into and/or substitutions of residues within the amino acid sequences of the antibody. Any combination of deletion, insertion, and substitution can be made to arrive at the final construct, provided that the final construct possesses the desired characteristic of IL-36 antigen binding. It is contemplated that a wide-range of variants of the anti-IL-36 antibodies of the present disclosure can be prepared using the methods and techniques known in the art and/or described herein, including but not limited to: (i) amino acid substitution, insertion and/or deletion variants; (ii) glycosylation variants; (iii) Fc region variants; (iv) cysteine engineered variants; and (v) derivatized variants.

[0162] The Examples, Tables 2 to 2D, and the Sequence Listing of the present disclosure provide a large number of exemplary variants of two specific anti-IL-36 antibodies, “mAb2,” and “mAb6_2.” In one preferred embodiment of the invention a bispecific antibody provided comprises heavy chains derived from the “mAb2.10” and “mAb 6.27” antibodies. Some of the exemplified variants comprise one or more of the following: a range of single, double, triple amino acid substitutions in HVR-H1, HVR-H2, and HVR-H3 that increase specific affinity for IL-36α/γ, or IL-36β, and/or cell-based blocking activities related to IL-36 mediated signaling; an Fc region variant that confers in effectorless function (e.g., N297G); and heavy chain substitutions resulting in “knob” and “hole” structures that allow for multispecific antibody formation. For example, the heavy chain antibody sequences disclosed in Table 2 can further include a carboxy-terminal lysine (i.e., “C-terminal Lys” or “C-terminal K”), YTE mutations at positions 252, 254, and 256 (i.e., M252Y/S254T/T256E), or both a C-terminal K and YTE mutations. Such variants of the heavy chain sequences of SEQ ID NOs: 170-241, 243-245, 248-250 are provided in Table 2A (and the accompanying Sequence Listing) as SEQ ID NO: 518-751. Further modified heavy chains are set out in Tables 2B and 2C, with Table 2D provided examples of preferred combinations of two heavy chains and one light chain for employing in multispecific, and in particular bispecific, antibodies of the present invention.

### A. Substitution, Insertion, and Deletion Variants

[0163] In some embodiments, anti-IL-36 antibody variants having one or more amino acid substitutions in addition to those described herein are provided. Sites for mutagenesis can include the HVRs and FRs. Typical “conservative” amino acid substitutions and/or substitutions based on common side-chain class or properties are well-known in the art and can be used in the embodiments of the present disclosure. The present disclosure also contemplates variants based on non-conservative amino acid substitutions in which a member of one of amino acid side chain class is exchanged for an amino acid from another class.

[0164] Amino acid side chains are typically grouped according to the following classes or common properties: (1) hydrophobic: Met, Ala, Val, Leu, Ile, Norleucine; (2) neutral hydrophilic: Cys, Ser, Thr, Asn, Gln; (3) acidic: Asp, Glu; (4) basic: His, Lys, Arg; (5) chain orientation influencing: Gly, Pro; and (6) aromatic: Trp, Tyr, Phe.

[0165] Techniques are well-known in the art for amino acid substitution into an antibody and subsequent screening for desired function, e.g., retained/improved antigen binding, decreased immunogenicity, or improved ADCC or CDC. Antibodies of the invention may, in one instance display ADCC and/or CDC. In a preferred embodiment they do not. As discussed herein, it may be that the antibody has been modified to reduce or eliminate such Fc region functions.

[0166] Amino acid substitution variants can include substituting one or more hypervariable region residues of a parent antibody (e.g., a humanized or human antibody). Generally, the resulting variant(s) selected for further study will have modifications in certain biological properties (e.g., increased affinity, reduced immunogenicity) relative to the parent antibody and/or will have substantially retained certain biological properties of the parent antibody. An exemplary substitutional variant is an affinity matured antibody, which may be conveniently generated, e.g., using phage display-based affinity maturation techniques such as those described in the Examples herein. Briefly, one or more HVR residues are mutated and the variant antibodies displayed on phage and screened for a particular biological activity (e.g., binding affinity).

[0167] A useful method for identifying residues or regions of an antibody that may be targeted for mutagenesis is “alanine scanning mutagenesis” (see e.g., Cunningham and Wells (1989) Science, 244: 1081-1085). In this method, a residue or group of target residues (e.g., charged residues such as Arg, Asp, His, Lys, and Glu) are identified and replaced by a neutral or negatively charged amino acid (e.g., Ala or polyalanine) to determine whether the interaction of the antibody with antigen is affected. Further substitutions may be introduced at the amino acid locations demonstrating functional sensitivity to the initial substitutions. Alternatively, or additionally, a crystal structure of an antigen-antibody complex to identify contact points between the antibody and antigen can be determined. Such contact residues and neighboring residues may be targeted or eliminated as candidates for substitution. Variants may be screened to determine whether they contain the desired properties.

[0168] Amino acid sequence insertions include amino- and/or carboxyl-terminal fusions ranging in length from one residue to polypeptides containing a hundred or more residues, as well as intra-sequence insertions of single or multiple amino acid residues. Examples of terminal insertions include an antibody with an N-terminal methionyl residue. Other insertional variants of the antibody molecule include the fusion to the N- or C-terminus of the antibody to an enzyme or a polypeptide which increases the serum half-life of the antibody.

[0169] Substitutions can be made in HVRs to improve antibody affinity. Such alterations may be made in “hotspots,” i.e., residues encoded by codons that undergo mutation at high frequency during the somatic maturation process (see, e.g., Chowdhury, Methods Mol. Biol. 207: 179-196 (2008)) with the resulting variant V_{H} or V_{L} being tested for binding affinity. In one embodiment, affinity maturation can be carried out by constructing and re-selecting from secondary libraries (see e.g., in Hoogenboom et al., Methods in Molecular Biology 178: 1-37 (O'Brien et al., ed., Human Press, Totowa, N.J., (2001)). Another method to introduce diversity involves HVR-directed approaches, in which several HVR residues (e.g., 4-6 residues at a time) are randomized. HVR residues involved in antigen binding may be specifically identified, e.g., using alanine scanning mutagenesis or modeling. CDR-H3 and CDR-L3 in particular are often targeted.

[0170] In some embodiments, substitutions, insertions, or deletions may occur within one or more HVRs so long as such alterations do not substantially reduce the ability of the antibody to bind antigen. For example, conservative alterations (e.g., conservative substitutions as provided herein) that do not substantially reduce binding affinity may be made in HVRs. Such alterations may be outside of HVR “hotspots.” In some embodiments of the variant V_{H} and V_{L} sequences provided above, each HVR either is unaltered, or contains no more than one, two or three amino acid substitutions. In a further embodiment an antibody of the invention will comprise sequence changes compared to the specific sequences set out here, for instance from one to 10, one to five, one to three, two, or one amino acid sequence changes. In one embodiment, the modification(s) may be conservative amino acid sequence changes. Preferably such sequence changes may be present and not significantly alter the binding properties of the antibody.

[0171] In one embodiment an antibody provided may have a specific level of sequence identity compared to one of the antibodies set out here. For instance, an antibody may display such a level of sequence identity over the length of a heavy chain variable region to that of an antibody disclosed in. In a preferred embodiment the level of amino acid sequence identity will be at least 90%. In another embodiment it will be at least 95%. In a further embodiment it may be at least 96%, 97%, 98% or 99%. It may be that the heavy chain variable regions differ by five or less, four or less, three or less, two, or one amino acid sequence change. In a preferred embodiment, such sequence changes are only present in the framework regions of the heavy chain variable regions. In a further preferred embodiment, such sequence changes are conservative amino acid sequence changes. In another preferred embodiment, the sequence changes or divergences do not significantly affect the affinity of the antibody for its target, for instance the strength of binding is still at least 10%, preferably at least 25%, more preferably at least 50% and more preferably at least 75% of that seen without the modification. Alternatively, or additionally, an antibody may display a level of sequence identity over the length of the light chain variable region of one of the antibodies disclosed herein or such sequence changes in the light chain variable region. In another preferred embodiment such levels of sequence identity or sequence changes may be present in the constant regions of the heavy and/or light chains of the antibody compared to those of one of the antibodies disclosed herein. Such levels of sequence identity and/or sequence changes may be present, in other embodiment, over the entire heavy and/or light chain sequences. In one particularly preferred embodiment, where specific modifications are set out herein, the level of sequence identity and/or sequence changes may be compared to the sequence with those specific modifications and those modifications are retained. Hence, in a preferred embodiment variant sequences will retain specific modifications set out herein.

### B. Glycosylation Variants

[0172] In some embodiments, the anti-IL-36 antibody of the present disclosure is altered to increase or decrease the extent to which the antibody is glycosylated. Addition or deletion of glycosylation sites to an antibody can be carried out by altering the amino acid sequence such that one or more glycosylation sites is created or removed.

[0173] In embodiments where the antibody comprises an Fc region, the carbohydrate attached to the Fc region can be altered. Typically, native antibodies produced by mammalian cells comprise a branched, biantennary oligosaccharide attached by an N-linkage to Asn297 of the CH2 domain of the Fc region (see, e.g., Wright et al. TIBTECH 15:26-32 (1997)). The oligosaccharide may include various carbohydrates, such as mannose, N-acetyl glucosamine (GlcNAc), galactose, and sialic acid, as well as, a fucose attached to a GlcNAc in the “stem” of the bi-antennary oligosaccharide structure. In some embodiments, the modifications of the oligosaccharide of an Fc region of an antibody can create a variant with certain improved properties.

[0174] In some embodiments, the anti-IL-36 antibody of the present disclosure can be a variant of a parent antibody, wherein the variant comprises a carbohydrate structure that lacks fucose attached (directly or indirectly) to an Fc region. For example, the amount of fucose in such antibody may be from about 1% to about 80%, from about 1% to about 65%, from about 5% to about 65%, or from about 20% to about 40%. The amount of fucose can be determined by calculating the average amount of fucose within the sugar chain at Asn297, relative to the sum of all glyco-structures attached to Asn 297 (e.g., complex, hybrid and high mannose structures) as measured by MALDI-TOF mass spectrometry (see e.g., WO 2008/077546). Asn297 refers to the asparagine residue located at about position 297 in the Fc region (Eu numbering of Fc region residues); however, Asn297 may also be located about ±3 amino acids upstream or downstream of position 297, i.e., between positions 294 and 300, due to minor sequence variations in antibodies.

[0175] In some embodiments, the fucosylation variants can have improved ADCC function. See, e.g., US Patent Publication Nos. US 2003/0157108, or US 2004/0093621. Examples of “defucosylated” or “fucose-deficient” antibodies and associated methods for preparing them are disclosed in e.g., US2003/0157108; US2003/0115614; US2002/0164328; US2004/0093621; US2004/0132140; US2004/0110704; US2004/0110282; US2004/0109865; WO2000/61739; WO2001/29246; WO2003/085119; WO2003/084570; WO2005/035586; WO2005/035778; WO2005/053742; WO2002/031140; Okazaki et al. J. Mol. Biol. 336: 1239-1249 (2004); Yamane-Ohnuki et al. Biotech. Bioeng. 87: 614 (2004).

[0176] Cell lines useful for producing defucosylated antibodies include Led 3 CHO cells deficient in protein fucosylation (see e.g., Ripka et al. Arch. Biochem. Biophys. 249:533-545 (1986); US2003/0157108, and WO2004/056312), and knockout cell lines, such as alpha-1,6-fucosyltransferase gene, FUT8, knockout CHO cells (see, e.g., Yamane-Ohnuki et al. Biotech. Bioeng. 87: 614 (2004); Kanda, Y. et al., Biotechnol. Bioeng., 94(4):680-688 (2006); and WO2003/085107). In a particularly preferred embodiment, an antibody of the invention is produced using CHO cells.

### C. FC Region Variants

[0177] In some embodiments, an anti-IL-36 antibody of the present disclosure can comprise one or more amino acid modifications in the Fc region (i.e., an Fc region variant). The Fc region variant may comprise a human Fc region sequence (e.g., a human IgG1, IgG2, IgG3, or IgG4 Fc region) comprising an amino acid substitution at one or more amino acid residue positions. A wide range of Fc region variants known in the art that are useful with the anti-IL-36 antibodies of the present disclosure are described below.

[0178] In some embodiments, the anti-IL-36 antibody is an Fc region variant which has altered effector function. In some embodiments, the antibody with altered effector function possesses some (but not all of) the effector functions, decreased effector function, or none of the effector functions (e.g., effectorless) of the parent antibody. Effectorless Fc region variants are more desirable for certain applications where effector function (such as ADCC) is unnecessary or deleterious, and/or in vivo half-life of the antibody is important.

[0179] Fc region variant antibodies with reduced effector function, or which are effectorless, can include an amino acid substitution at one or more of the following Fc region positions: 238, 265, 269, 270, 297, 327 and 329 (see, e.g., U.S. Pat. No. 6,737,056). Such Fc region variants can include amino acid substitutions at two or more of positions 265, 269, 270, 297 and 327. Such Fc region variants can also include substitutions of both residues 265 and 297 to alanine (see e.g., U.S. Pat. No. 7,332,581). As disclosed in the Examples and elsewhere herein, in some embodiments, the anti-IL-36 antibodies of the present disclosure are effectorless Fc region variants. In some embodiments, the effectorless Fc region variants of the anti-IL-36 antibodies comprise the amino acid substitution N297G.

[0180] Fc region variants having improved or diminished binding to FcRs are disclosed in e.g., U.S. Pat. No. 6,737,056; WO 2004/056312; and Shields et al., J. Biol. Chem. 9(2): 6591-6604 (2001). Fc region variants having improved ADCC can comprise one or more amino acid substitutions at e.g., positions 298, 333, and/or 334 of the Fc region (based on EU numbering). Fc region variants having altered (i.e., either improved or diminished) Clq binding and/or Complement Dependent Cytotoxicity (CDC), as described in e.g., U.S. Pat. No. 6,194,551, WO99/51642, and Idusogie et al., J. Immunol. 164: 4178-4184 (2000). Fc region variants with increased half-lives and improved binding to the neonatal Fc receptor (FcRn) are disclosed in e.g., US2005/0014934A1 (Hinton et al.). Such Fc region variants comprise amino acid substitutions at one or more of positions: 238, 256, 265, 272, 286, 303, 305, 307, 311, 312, 317, 340, 356, 360, 362, 376, 378, 380, 382, 413, 424, and 434. Other Fc region variants with increased half-lives include the set of YTE mutations at positions 252, 254, and 256 (i.e., M252Y/S254T/T256E) described in e.g., U.S. Pat. No. 7,658,921B2 (Dall'Acqua et al.). Other examples of Fc region variants can be found in e.g., U.S. Pat. Nos. 5,648,260 and 5,624,821; and WO94/29351.

[0181] Generally, in vitro and/or in vivo cytotoxicity assays can be carried out to confirm the reduction/depletion of CDC and/or ADCC activities in an Fc region variant. For example, Fc receptor (FcR) binding assays can be conducted to ensure that the antibody lacks FcγR binding (hence likely lacking ADCC activity) but retains FcRn binding ability. The primary cells for mediating ADCC, NK cells express FcγRIII only, whereas monocytes express FcγRI, FcγRII, and FcγRIII. Non-limiting examples of in vitro assays to assess ADCC activity of a molecule of interest is described in U.S. Pat. No. 5,500,362 (see, e.g. Hellstrom, et al., Proc. Nat'l Acad. Sci. USA 83:7059-7063 (1986)) and Hellstrom, et al., Proc. Nat'l Acad. Sci. USA 82: 1499-1502 (1985); 5,821,337 (see Bruggemann, M. et al., J. Exp. Med. 166: 1351-1361 (1987)). Alternatively, non-radioactive assay methods may be employed (see, for example, ACTI™ nonradioactive cytotoxicity assay for flow cytometry (CellTechnology, Inc. Mountain View, Calif.; and CytoTox96® non-radioactive cytotoxicity assay (Promega, Madison, Wis.). Useful effector cells for such assays include peripheral blood mononuclear cells (PBMC) and Natural Killer (NK) cells. Alternatively, or additionally, ADCC activity of the molecule of interest may be assessed in vivo, e.g., in an animal model such as that disclosed in Clynes et al. Proc. Nat'l Acad. Sci. USA 95:652-656 (1998). Clq binding assays may also be carried out to confirm that the antibody is unable to bind Clq and hence lacks CDC activity. See, e.g., Clq and C3c binding ELISA in WO2006/029879 and WO2005/100402. To assess complement activation, a CDC assay may be performed (see, e.g., Gazzano-Santoro et al., J. Immunol. Methods 202: 163 (1996); Cragg, M. S. et al., Blood 101: 1045-1052 (2003); and Cragg, M. S. and M. J. Glennie, SW 103:2738-2743 (2004)). FcRn binding and in vivo clearance/half-life determinations can be performed using methods known in the art (see, e.g., Petkova, et al., Intl. Immunol. 18(12): 1759-1769 (2006)).

[0182] It is contemplated that a wide-range of Fc region variants of the anti-IL-36 antibodies of the present disclosure can be prepared using the methods and techniques known in the art and/or described herein. For example, the Fc region variant prepared with the N297G amino acid substitution confers effectorless function on anti-IL-36 antibodies with retention of cell-based blocking activity as described in Examples 2, 3, and 8.

### D. Cysteine Engineered Variants

[0183] In some embodiments, it is contemplated that the anti-IL-36 antibody described herein can be substituted at specific non-CDR positions with cysteine residues so as to create reactive thiol groups. Such engineered “thioMAbs” can be used to conjugate the antibody to e.g., drug moieties or linker-drug moieties and thereby create immunoconjugates, as described elsewhere herein. Cysteine engineered antibodies can be generated as described in e.g., U.S. Pat. No. 7,521,541. In some embodiments, any one or more of the following antibody residues can be substituted with cysteine: V205 (Kabat numbering) of the light chain; A118 (EU numbering) of the heavy chain; and S400 (EU numbering) of the heavy chain Fc region.

### E. Derivatized Variants

[0184] In some embodiments, the anti-IL-36 antibody of the present disclosure may be further modified (i.e., derivatized) with non-proteinaceous moieties. Non-proteinaceous moieties suitable for derivatization of the antibody include, but are not limited to, water soluble polymers, such as: polyethylene glycol (PEG), copolymers of ethylene glycol and propylene glycol, carboxy-methylcellulose, dextran, polyvinyl alcohol, polyvinyl pyrrolidone, poly-1, 3-dioxolane, poly-1, 3, 6-trioxane, ethylene/maleic anhydride copolymer, poly-amino acid homo-polymers or random co-polymers, and dextran or poly(n-vinyl pyrrolidone)polyethylene glycol, propropylene glycol homo-polymers, polypropylene oxide/ethylene oxide co-polymers, polyoxy-ethylated polyols (e.g., glycerol), polyvinyl alcohol, and mixtures thereof. In some embodiments, modification of the antibody can be carried out using methoxy-polyethylene glycol propionaldehyde. The polymers may be of any molecular weight and may be branched or unbranched. The number of polymers attached to the antibody may vary, and if more than one polymer is attached, they can be the same or different molecules. In general, the number and/or type of polymers used for derivatization can be determined based on considerations including, but not limited to, the particular properties or functions of the antibody, e.g., whether the antibody derivative will be used in a therapy under defined conditions.

### F. Examples of Modifications, and Preferred Heavy and Light Chain Modifications

[0185] As discussed above, antibodies of the present invention may comprise modifications to the heavy and light chains of the antibodies for a variety of reasons. In one embodiment, a modification may increase the stability of the antibody, for instance a modification may increase the serum half-life of the antibody. In another the modifications may reduce or eliminate Fc function of the antibody, bringing about Fc function silencing. In a further preferred embodiment the modification may alter the isoelectric point of the antibody. In another preferred embodiment, the modifications may facilitate the production of a multispecific, and in particular bispecific, antibody by favoring formation of heterodimers over homodimers. In a particularly preferred embodiment of the invention the antibody may comprise heavy chains or light chains having a combination of modifications. Any of the antibodies provided herein may already have, or be modified to include, the modifications discussed in this section.

[0186] In one embodiment, a heavy chain in an antibody of the invention may comprise one or more of the following amino acids or modifications with the positions being given in the heavy chain sequence according to EU numbering, unless otherwise stated:
[0187] “Q” is a Q as the N-terminal residue;
[0188] “E” is a Q1E modification with E as the N-terminal residue;
[0189] “LALA” is a L234A L235A modification;
[0190] “N297G” is a N297G modification;
[0191] “LS” is a M428L/N434S modification;
[0192] “YTE” is a M252Y S254T T256E modification;
[0193] “KiH” which indicates the antibody comprises a first heavy chain that has a “knob” modification T366W, optionally with a S354C modification, and a second heavy chain which has a “hole” modification T366S/L368A/Y407V, optionally with a Y349C modification;
[0194] “HiK (inverse)” which indicates that the antibody comprises a first heavy chain that has a “hole” modification T366S/L368A/Y407V, optionally with a Y349C modification and a second heavy chain with a “knob” modification T366W, optionally with a S354C modification; and
[0195] a C-terminal Lysine residue (C-Lys).

[0196] In an especially preferred embodiment a heavy chain of the antibody has the “LALA” modification which corresponds to the L234A L235A sequence modifications. Hence, a heavy chain may have Alanine residues at both positions 234 and 235. In a preferred embodiment both heavy chains of the antibody comprise the LALA modification, in particular where the antibody is a multispecific antibody and preferably a bispecific antibody. The presence of the LALA modification may increase the silencing of Fc function of the antibody compared to in the absence of the modification. The presence of the LALA may increase the stability of the antibody, particularly in conjunction with other modifications. In a preferred embodiment of the invention, any of the antibodies disclosed herein may be modified, or already incorporate the LALA modification. In another preferred embodiment, an antibody of the invention either has the LALA modification or the N297G modification in one or both heavy chains and preferably both. In another preferred embodiment, an antibody of the invention may have one or both, and preferably both, heavy chains having the N297G modification instead of the LALA modification.

[0197] In a further preferred embodiment of the invention, any of the antibodies disclosed herein may have introduced, or already have, a glutamic acid or glutamate amino acid residue (Glu or E) as the N-terminal residue of one or both heavy chains according to Kabat numbering. Hence, in a preferred embodiment one or both, and preferably both, heavy chains comprise the Q1E modification. Such a modification may increase the isolectric point of the antibody. In an alternative embodiment, a heavy chain may have a Glutamin (Gln or Q) as the N-terminal residue of the heavy chain according to Kabat numbering. In an especially preferred embodiment, a heavy chain of the invention may comprise a C-terminal Lysine residue (L or Lys, also referred to as C-Lys).

[0198] In another preferred embodiment of the invention, a heavy chain in an antibody of the invention may comprise a modification or modification intended to alter the half-life of the antibody, preferably to increase the half-life of the antibody. Examples of such a modification include a heavy chain comprising the “LS” modification which is a M428L/N434S modification. A particularly preferred embodiment of the invention is where a YTE modification is present in a heavy chain, particularly both heavy chains. The “YTE” modification is a M252Y S254T T256E modification. In one preferred embodiment of the invention, the antibody provided has one or both heavy chains comprising either the “LS” modification or the “YTE” modification.

[0199] In one of the particularly preferred embodiments of the invention, the antibody provided is a bispecific antibody comprising the modification or modifications discussed herein. One issue with the production of bispecific antibodies is that expression of the heavy and light chain sequences of the antibody may result in production of not just the bispecific antibody, but also unwanted species including monospecific antibodies. Hence, in a preferred embodiment the heavy chains of the antibody include sequences that favor production of bispecific antibodies over unwanted species. In a preferred embodiment, the heavy chains for the two different specificities of the bispecific antibody comprise amino acids that favor formation of heterodimeric antibodies (antibodies with two different heavy chains) over homodimeric antibodies (antibodies where both heavy chains are for the same specificity).

[0200] In a particularly preferred embodiment, the two different heavy chains of a multispecific, and preferably bispecific, antibody of the invention comprise “knob-in-hole” modifications that favor heterodimer formation. In a preferred embodiment, an antibody of the invention has heavy chains that has a “knob” modification T366W and a second heavy chain which has a “hole” modification T366S/L368A/Y407V. In a particularly preferred embodiment, an antibody of the invention has heavy chains with a “KiH” modification which indicates the antibody comprises a first heavy chain that has a “knob” modification T366W, optionally with a S354C modification, and a second heavy chain which has a “hole” modification T366S/L368A/Y407V, optionally with a Y349C modification. In another preferred embodiment of the invention, an antibody of the invention has a hole-in-knob modification, so the opposite way round in terms of which heavy chain comprises the knob comprises the hole.

[0201] In a further preferred embodiment, an antibody of the invention may comprise modifications to introduce a disulphide bridge or bridges to help with the stability of the antibody. In a preferred embodiment, any of the antibodies provided may have, or may have introduced, the heavy chain modifications S354C and Y349C to facilitate the formation of a disulphide bridge, preferably such modifications may be present in combination with the knob-in-hole or hole-in-knob modifications discussed above. In another embodiment they are present but knob in hole modifications are not.

[0202] In one preferred embodiment, the antibody provided is a multispecific antibody, in particular a bispecific antibody, where the antibody comprises two heavy chains which both have one of (a) to (x): (a) Q-LALA-LS-S354/Y349-KiH; (b) Q-LALA-LS-S354/Y349-HiK (inverse); (c) Q-LALA-LS-KiH; (d) Q-LALA-LS-HiK (inverse); (e) Q-LALA-YTE-S354/Y349-KiH; (f) Q-LALA-YTE-S354/Y349-HiK (inverse); (g) Q-LALA-YTE-KiH; (h) Q-LALA-YTE-HiK (inverse); (i) E-LALA-LS-S354/Y349-KiH; (j) E-LALA-LS-S354/Y349-HiK (inverse); (k) E-LALA-LS-KiH; (l) E-LALA-LS-HiK (inverse); (m) E-LALA-YTE-S354/Y349-KiH; (n) E-LALA-YTE-S354/Y349-HiK (inverse); (o) E-LALA-YTE-KiH; (p) E-LALA-YTE-HiK (inverse); (q) Q-LALA-S354/Y349-KiH; (r) Q-LALA-S354/Y349-HiK (inverse); (s) Q-LALA KiH; (t) Q-LALA HiK (inverse); (u) E-LALA-S354/Y349-KiH; (v) E-LALA-S354/Y349-HiK (inverse); (w) E-LALA KiH; and (x) E-LALA HiK (inverse), wherein: “Q” is a Q as the N-terminal residue; “E” is a Q1E modification with E as the N-terminal amino acid; “LALA” is a L234A L235A modification; “LS” is a M428L/N434S modification; “YTE” is a M252Y S254T T256E modification; “KiH” indicates that the first heavy chain has a “knob” modification T366W and the second chain has a “hole” modification T366S/L368A/Y407V; and “HiK (inverse)” indicates that the first heavy chain has a “hole” modification T366S/L368A/Y407V and the second heavy chain has a “knob” modification T366W. Such modifications may be present in, or introduced into, any of the antibodies provided herein.

[0203] In a further preferred embodiment, the antibody provided is a multispecific antibody, in particular a bispecific antibody, where the antibody comprises two heavy chains which both have one of (a) to (ll): (a) Q-LALA-LS-S354/Y349-KiH; (b) Q-LALA-LS-S354/Y349-HiK (inverse); (c) Q-LALA-LS-KiH; (d) Q-LALA-LS-HiK (inverse); (e) Q-LALA-YTE-S354/Y349-KiH; (f) Q-LALA-YTE-S354/Y349-HiK (inverse); (g) Q-LALA-YTE-KiH; (h) Q-LALA-YTE-HiK (inverse); (i) Q-N297G-LS-S354/Y349-KiH; (j) Q-N297G-LS-S354/Y349-HiK (inverse); (k) Q-N297G-LS-KiH; (1) Q-N297G-LS-HiK (inverse); (m) Q-N297G-YTE-S354/Y349-KiH; (n) Q-N297G-YTE-S354/Y349-HiK (inverse); (o) Q-N297G-YTE-KiH; (p) Q-N297G-YTE-HiK (inverse); (q) E-LALA-LS-S354/Y349-KiH; (r) E-LALA-LS-S354/Y349-HiK (inverse); (s) E-LALA-LS-KiH; (t) E-LALA-LS-HiK (inverse); (u) E-LALA-YTE-S354/Y349-KiH; (v) E-LALA-YTE-S354/Y349-HiK (inverse); (w) E-LALA-YTE-KiH; (x) E-LALA-YTE-HiK (inverse); (y) E-N297G-LS-S354/Y349-KiH; (z) E-N297G-LS-S354/Y349-HiK (inverse); (aa) E-N297G-LS-KiH; (bb) E-N297G-LS-HiK (inverse); (cc) E-N297G-YTE-S354/Y349-KiH; (dd) E-N297G-YTE-S354/Y349-HiK (inverse); (ee) Q-LALA-S354/Y349-KiH; (ff) Q-LALA-S354/Y349-HiK (inverse); (gg) Q-LALA KiH; (hh) Q-LALA HiK (inverse); (ii) E-LALA-S354/Y349-KiH; (jj) E-LALA-S354/Y349-HiK (inverse); (kk) E-LALA KiH; and (ll) E-LALA HiK (inverse), wherein:
[0204] “Q” is a Q as the N-terminal residue;
[0205] “E” is a Q1E modification with E as the N-terminal amino acid;
[0206] “LALA” is a L234A L235A modification;
[0207] “N297G” is a N297G modification;
[0208] “LS” is a M428L/N434S modification;
[0209] “YTE” is a M252Y S254T T256E modification;
[0210] “KiH” indicates that the heavy chain of (i) has a “knob” modification T366W and the heavy chain of (ii) has a “hole” modification T366S/L368A/Y407V; and
[0211] “HiK (inverse)” indicates that the heavy chain of (i) has a “hole” modification T366S/L368A/Y407V and the heavy chain of (ii) has a “knob” modification T366W,
   optionally the heavy chains may comprise a C-terminal Lysine (C-Lys or C-K). In another embodiment, the above (a) to (ll) may further include (mm) E-N297G-YTE-KiH and (nn) E-N297G-YTE-HiK as options for the heavy chains to both have.

[0212] Tables 2A, 2B, 2C, and 2D provide examples of particularly preferred light and heavy chains for employing in the present invention. In a preferred embodiment the heavy chain or chains are from Table 2B and/or 2C. Table 2D provides examples of particularly preferred combinations of heavy chains for a bispecific antibody of the invention. FIGS. 5 and 6 also provide examples of particularly preferred light and heavy chains. For instance, in one embodiment an antibody of the present invention may comprise at least one of the heavy chains sequences shown. In one preferred embodiment an antibody will comprise two of the identified heavy chains. In a preferred embodiment, an antibody will be a multi-specific, and in particular a bispecific antibody, which comprises one of the pairs of heavy chains indicated in Table 2D. In a preferred embodiment, an antibody will be a multi-specific, and in particular a bispecific antibody, which comprises one of the pairs of heavy chains indicated in Table 2D apart from LC1-HCβ31-HCαγ32 and LC1-HCβ32-HCαγ31. In another embodiment are included in preferred combinations. In another particularly preferred embodiment the antibody will also comprise the light chain indicated in Table 2D. Hence, Table 2D provides examples of particularly preferred antibodies of the present invention in terms of the heavy and light chains present in the antibody and in a preferred embodiment the two heavy and light chains are one of the combinations indicated in Table 2D apart from LC1-HCβ31-HCαγ32 and LC1-HCβ32-HCαγ31. In another, LC1-HCβ31-HCαγ32 and LC1-HCβ32-HCαγ31 are included as preferred combinations. In another preferred embodiment, an antibody of the invention will comprise a heavy chain indicated in Table 2B and specifically bind IL-36β. In another preferred embodiment, an antibody of the invention will comprise a heavy chain indicated in Table 2C and specifically bind IL-36α and/or IL-36γ and preferably both IL-36α and IL-36γ.

[0213] In one preferred embodiment, an antibody of the invention is a multispecific, and preferably bispecific antibody, wherein the two heavy chains each comprise the same one of the following (a) to (1): (a) Q-LALA-LS-S354/Y349-KiH; (b) Q-LALA-LS-S354/Y349-HiK (inverse); (c) Q-LALA-YTE-S354/Y349-KiH; (d) Q-LALA-YTE-S354/Y349-HiK (inverse); (e) Q-LALA-YTE-KiH; (f) Q-LALA-YTE-HiK (inverse); (g) E-LALA-LS-S354/Y349-KiH; (h) E-LALA-LS-S354/Y349-HiK (inverse); (i) E-LALA-YTE-S354/Y349-KiH; (j) E-LALA-YTE-S354/Y349-HiK (inverse); and (k) E-LALA-YTE-KiH; and (l) E-LALA-YTE-HiK (inverse). In one particularly preferred embodiment the heavy chains both comprise a C-terminal Lysine (C-Lys or C-K).

[0214] In a particularly preferred embodiment an antibody of the invention is a multispecific, and preferably bispecific antibody, wherein the two heavy chains each comprise the same one of the following (a) to (f): (a) Q-LALA-LS-S354/Y349-KiH; (b) Q-LALA-LS-S354/Y349-HiK (inverse); (c) Q-LALA-YTE-S354/Y349-KiH; (d) Q-LALA-YTE-S354/Y349-HiK (inverse); (e) Q-LALA-YTE-KiH; and (f) Q-LALA-YTE-HiK (inverse). In one particularly preferred embodiment the heavy chains both comprise a C-terminal Lysine (C-Lys or C-K).

[0215] In an especially preferred embodiment an antibody of the invention is a multispecific, and preferably bispecific antibody, wherein the two heavy chains each comprise the same one of the following: (a) Q-LALA-LS-S354/Y349-KiH; (b) Q-LALA-LS-S354/Y349-HiK (inverse); (c) Q-LALA-YTE-S354/Y349-KiH; and (d) Q-LALA-YTE-S354/Y349-HiK (inverse). In one particularly preferred embodiment the heavy chains both comprise a C-terminal Lysine (C-Lys or C-K).

[0216] In a further especially preferred embodiment an antibody of the invention is a multispecific, and preferably bispecific antibody, wherein the two heavy chains each comprise the same one of the following (a) to (e): (a) Q-LALA-LS-S354/Y349-KiH; (b) Q-LALA-YTE-S354/Y349-KiH; (c) Q-LALA-YTE-S354/Y349-HiK (inverse); and (d) Q-LALA-YTE-KiH. In one particularly preferred embodiment the heavy chains both comprise a C-terminal Lysine (C-Lys or C-K).

[0217] In one preferred embodiment, a multispecific antibody of the invention, and preferably a bispecific antibody of the invention comprises a pair of heavy chain sequences selected from one of the following pairs of SEQ ID Nos: 752/791; 753/790; 756/795; 757/794; 768/807; 769/806; 772/811; 773/810; 774/813; and 775/812. In a preferred embodiment the antibody further comprises a light chain selected from SEQ ID Nos: 246 and 169. In a more preferred embodiment, the antibody comprises one of the following combinations of two heavy and one light chain sequences: SEQ ID Nos: 752/791/246; 753/790/246; 756/795/246; 757/794/246; 768/807/169; 769/806/169; 772/811/169; 773/810/169; 774/813/169; and 775/812/169.

[0218] In one preferred embodiment, a multispecific antibody of the invention, and preferably a bispecific antibody of the invention comprises a pair of heavy chain sequences selected from one of the following pairs of SEQ ID Nos: 752/791; 753/790; 756/795; 757/794; 758/797; and 759/796 In a preferred embodiment the antibody further comprises the light chain of SEQ ID No: 246.

[0219] In one preferred embodiment, a multispecific antibody of the invention, and preferably a bispecific antibody of the invention comprises a pair of heavy chain sequences selected from one of the following pairs of SEQ ID Nos: 752/791; 753/790; 756/795; and 757/794. In a preferred embodiment the antibody further comprises the light chain of SEQ ID No: 246.

[0220] In one preferred embodiment, a multispecific antibody of the invention, and preferably a bispecific antibody of the invention comprises a pair of heavy chain sequences selected from one of the following pairs of SEQ ID Nos: 752/791; 756/795; 757/794; and 758/797; In a preferred embodiment the antibody further comprises the light chain of SEQ ID No: 246.

[0221] As discussed herein antibodies of the inventions may comprise modifications, such as the specific ones set out herein. The modifications may be relative to the unmodified sequence set out herein.

[0222] In one preferred embodiment an antibody employed in the invention is not one of those antibodies disclosed in International Patent Application No. PCT/US2019/067435.

### 8. Immunoconjugates

[0223] In some embodiments, the anti-IL-36 antibody of the present disclosure can also be an immunoconjugate, wherein the immunoconjugate comprises an anti-IL-36 antibody conjugated to one or more cytotoxic agents. Suitable cytotoxic agents contemplated by the present disclosure include chemotherapeutic agents, drugs, growth inhibitory agents, toxins (e.g., protein toxins, enzymatically active toxins of bacterial, fungal, plant, or animal origin, or fragments thereof), or radioactive isotopes.

[0224] In some embodiments, the immunoconjugate is an antibody-drug conjugate (ADC) in which an anti-IL-36 antibody, as described herein, is conjugated to one or more drugs.

[0225] In some embodiments, an immunoconjugate of the present disclosure comprises an anti-IL-36 antibody as described herein conjugated to a drug or therapeutic agent for the treatment of an IL-36-mediated disease or condition.

[0226] In some embodiments, an anti-IL-36 antibody as described herein can be conjugated to an enzymatically active toxin or a fragment thereof, including but not limited to diphtheria A chain, non-binding active fragments of diphtheria toxin, exotoxin A chain (from Pseudomonas aeruginosa), ricin A chain, abrin A chain, modeccin A chain, alpha-sarcin, Aleurites fordii proteins, dianthin proteins, Phytolaca americana proteins, Momordica charantia inhibitor, curcin, crotin, Sapaonaria officinalis inhibitor, gelonin, mitogellin, restrictocin, phenomycin, enomycin, and the tricothecenes.

[0227] In some embodiments, an immunoconjugate of the present disclosure comprises an anti-IL-36 antibody as described herein conjugated to a radioactive isotope (i.e., a radioconjugate). A variety of radioactive isotopes are available for the production of such radioconjugates. Examples include ²¹¹At, ¹³¹I, ¹²⁵I, ⁹⁰Y ¹⁸⁶Re, ¹⁸⁸Re, ¹⁵³Sm, ²¹²Bi, ³²P, ²¹²Pb, and radioactive isotopes of Lu. In some embodiments, the immunoconjugate may comprise a radioisotope for scintigraphic detection, or a spin label for NMR detection or MRI. Suitable radioisotopes or spin labels can include, as ¹²³I, ¹³¹I, ¹¹¹In, ¹³C, ¹⁹F, ¹⁵N, ¹⁷O, various isotopes of Gd, Mn, and Fe.

[0228] Immunoconjugates of an anti-IL-36 antibody and a cytotoxic agent, can be made using a variety of well-known bifunctional reagents and chemistries suitable for conjugating to proteins. Such reagents include but are not limited to: N-succinimidyl-3-(2-pyridyldithio) propionate (SPDP), succinimidyl-4-(N-maleimidomethyl) cyclohexane-1-carboxylate (SMCC), iminothiolane (IT), bifunctional derivatives of imidoesters (e.g., dimethyl adipimidate HQ), active esters (e.g., disuccinimidyl suberate), aldehydes (e.g., glutaraldehyde), bis-azido compounds (e.g., bis-(p-azidobenzoyl)-hexanediamine), bis-diazonium derivatives (e.g., bis-(p-diazoniumbenzoyl)-ethylenediamine), diisocyanates (e.g., toluene-2,6-diisocyanate), and bis-active fluorine compounds (e.g., 1,5-difluoro-2,4-dinitrobenzene).

[0229] Reagents for preparing immunoconjugates of the present disclosure can also include commercially available “cross-linking” reagents such as: BMPS, EMCS, GMBS, HBVS, LC-SMCC, MBS, MPBH, SBAP, SIA, SIAB, SMCC, SMPB, SMPH, sulfo-EMCS, sulfo-GMBS, sulfo-KMUS, sulfo-MBS, sulfo-SIAB, sulfo-SMCC, and sulfo-SMPB, and SVSB (succinimidyl-(4-vinylsulfone)benzoate) (see e.g., Pierce Biotechnology, Inc., Rockford, Ill., U.S.A).

### 9. Synthetic Antibodies

[0230] In some embodiments, the anti-IL-36 antibody of the present disclosure can be a synthetic antibody comprising a set of CDRs from an anti-IL-36 immunoglobulin (e.g., CDR-L1, etc.) grafted onto a scaffold or framework other than an immunoglobulin scaffold or framework, such as an alternative protein scaffold, or an artificial polymer scaffold.

[0231] Exemplary alternative protein scaffolds contemplated for preparation of synthetic antibodies of the present disclosure can include, but are not limited to: fibronectin, neocarzinostatin CBM4-2, lipocalins, T-cell receptor, protein-A domain (protein Z), Im9, TPR proteins, zinc finger domains, pVIII, avian pancreatic polypeptide, GCN4, WW domain Src homology domain 3, PDZ domains, TEM-1 beta-lactamase, thioredoxin, staphylococcal nuclease, PHD-finger domains, CL-2, BPTI, APPI, HPSTI, ecotin, LACI-D1, LDTI, MTI-II, scorpion toxins, insect defensin-A peptide, EETI-II, Min-23, CBD, PBP, cytochrome b-562, Ldl receptor domains, gamma-crystallin, ubiquitin, transferrin, and/or C-type lectin-like domains.

[0232] Exemplary artificial polymer (non-protein) scaffolds useful for synthetic antibodies are described in e.g., Fiedler et al., (2014) “Non-Antibody Scaffolds as Alternative Therapeutic Agents,” in Handbook of Therapeutic Antibodies (eds. S. Dubel and J. M. Reichert), Wiley-VCH Verlag GmbH & Co.; Gebauer et al., Curr. Opin. Chem. Biol., 13:245-255 (2009); Binz et al, Nat. Biotech., 23(10): 1257-1268 (2005).

### IV. Recombinant Methods and Compositions

[0233] The anti-IL-36 antibody of the present disclosure can be produced using recombinant methods and materials well-known in the art of antibody production. In some embodiments, the present disclosure provides an isolated nucleic acid encoding an anti-IL-36 antibody. The nucleic acid can encode an amino acid sequence comprising the V_{L} and/or an amino acid sequence comprising the V_{H} of the antibody (e.g., the light and/or heavy chains of the antibody). In some embodiments, one or more vectors (e.g., expression vectors) comprising nucleic acid sequences encoding an anti-IL-36 antibody of the present disclosure are provided. In some embodiments, a host cell comprising nucleic acid sequences encoding an anti-IL-36 antibody of the present disclosure are provided. In one embodiment, the host cell has been transformed with a vector comprising a nucleic acid that encodes an amino acid sequence comprising the V_{L} of the antibody and an amino acid sequence comprising the V_{H} of the antibody. In another embodiment, the host cell has been transformed with a first vector comprising a nucleic acid that encodes an amino acid sequence comprising the V_{L} of the antibody and a second vector comprising a nucleic acid that encodes an amino acid sequence comprising the V_{H} of the antibody. In another embodiment, the host cells has been transformed with vectors for each of the V_{L} of the antibody and the two V_{H} chains of the antibody. In one embodiment the same vector encodes all three. In another the V_{L} of the antibody is encoded by a first vector and a second vector encodes the two V_{H} chains of the antibody

[0234] In some embodiments of the recombinant methods, the host cell used is a eukaryotic cell, such as a Chinese Hamster Ovary (CHO) cell, or a lymphoid cell (e.g., Y0, NS0, Sp20). In one embodiment, a method of making an anti-IL-36 antibody is provided, wherein the method comprises culturing a host cell comprising a nucleic acid encoding the antibody, as provided above, under conditions suitable for expression of the antibody, and optionally recovering the antibody from the host cell (or host cell culture medium).

[0235] Briefly, recombinant production of an anti-IL-36 antibody is carried out by isolating a nucleic acid encoding an antibody (e.g., as described herein) and inserting this nucleic acid into one or more vectors for further cloning and/or expression in a host cell. Such nucleic acids are readily isolated and sequenced using conventional procedures well-known in the art (e.g., by using oligonucleotide probes that are capable of binding specifically to genes encoding the heavy and light chains of the desired antibody). Suitable host cells and culturing methods for cloning or expressing the antibody-encoding vectors are well-known in the art and include prokaryotic or eukaryotic cells. Typically, after expression, the antibody may be isolated from cell paste in a soluble fraction and further purified. In addition to prokaryotes, eukaryotic microbes such as filamentous fungi or yeast are suitable cloning or expression hosts for antibody-encoding vectors, including fungi and yeast strains whose glycosylation pathways have been “humanized,” resulting in the production of an antibody with a partially or fully human glycosylation pattern (see e.g., Gerngross, Nat. Biotech. 22: 1409-1414 (2004), and Li et al., Nat. Biotech. 24:210-215 (2006)).

[0236] Suitable host cells for the expression of glycosylated anti-IL-36 antibodies of the present disclosure can also be derived from multicellular organisms (invertebrates and vertebrates). Examples of invertebrate cells include plant and insect cells. Numerous baculoviral strains have been identified which may be used in conjunction with insect cells, particularly for transfection of Spodoptera frugiperda cells. Plant cell cultures can also be utilized as hosts (see, e.g., U.S. Pat. Nos. 5,959,177, 6,040,498, 6,420,548, and 7,125,978.

[0237] Examples of mammalian host cell lines useful for the production of the anti-IL-36 antibodies of the present disclosure include Chinese hamster ovary (CHO) cells, including DHFR-CHO cells (see e.g., Urlaub et al., Proc. Natl. Acad. Sci. USA 77:4216 (1980)); myeloma cell lines such as Y0, NS0 and Sp2/0; monkey kidney CVl line transformed by SV40 (COS-7); human embryonic kidney line (293 or 293 cells as described, e.g., in Graham et al., J. Gen Virol. 36:59 (1977)); baby hamster kidney cells (BHK); mouse Sertoli cells (TM4 cells as described, e.g., in Mather, Biol. Reprod. 23:243-251 (1980)); monkey kidney cells (CVl); African green monkey kidney cells (VERO-76); human cervical carcinoma cells (HELA); canine kidney cells (MDCK); buffalo rat liver cells (BRL 3A); human lung cells (W138); human liver cells (Hep G2); mouse mammary tumor (MMT 060562); TR1 cells (see e.g., in Mather et al., Annals N Y. Acad. Sci. 383:44-68 (1982) and U.S. Pat. No. 6,235,498); Medical Research Council 5 (MRC 5) cells (such as e.g., those available from ATCC and also referred to as CCL-171); and Foreskin 4 (FS4) cells (see e.g., in Vilcek et al. Ann. N. Y. Acad. Sci. 284:703-710 (1977), Gardner & Vilcek. J. Gen. Virol. 44:161-168 (1979), and Pang et al. Proc. Natl. Acad. Sci. U.S.A. 77:5341-5345 (1980)). For a general review of useful mammalian host cell lines suitable for antibody production, see, e.g., Yazaki and Wu, Methods in Molecular Biology, Vol. 248 (B. K. C. Lo, ed., Humana Press, Totowa, N.J.), pp. 255-268 (2003).

### V. Pharmaceutical Compositions and Formulations of Anti-IL-36 Antibodies

[0238] The present disclosure also provides pharmaceutical compositions and pharmaceutical formulations comprising an anti-IL-36 antibody. In some embodiments, the present disclosure provides a pharmaceutical formulation comprising an anti-IL-36 antibody as described herein and a pharmaceutically acceptable carrier. In some embodiments, the anti-IL-36 antibody is the sole active agent of the pharmaceutical composition. Such pharmaceutical formulations can be prepared by mixing an anti-IL-36 antibody, having the desired degree of purity, with one or more pharmaceutically acceptable carriers. Typically, such antibody formulations can be prepared as an aqueous solution (see e.g., U.S. Pat. No. 6,171,586, and WO2006/044908) or as a lyophilized formulation (see e.g., U.S. Pat. No. 6,267,958).

[0239] In one embodiment the anti-IL-36 antibody may be given simultaneously, separately or sequentially with one or more further therapeutic agent. For instance, it may be given with an anti-inflammatory agent, examples of which include steroid drugs, such as corticosteroids, and/or NSAIDs (non-steroid anti-inflammatory drugs). In one preferred embodiment they may be given as well as a topical steroid. In another preferred embodiment, the anti-IL-36 antibody may be given to a subject who has developed resistance to a different therapy. For instance, they may be given as an alternative to the other therapy or to augment it.

[0240] It is also contemplated that the compositions and formulations comprising an anti-IL-36 antibody as disclosed herein may further contain other active ingredients (i.e., therapeutic agents) in addition to the anti-IL-36, useful for the particular indication being treated in the subject to whom the formulation is administered. Preferably, any additional therapeutic agent has activity complementary to that of the anti-IL-36 antibody activity and the activities do not adversely affect each other. Accordingly, in some embodiments, the disclosure provides a pharmaceutical composition comprising an anti-IL-36 antibody as disclosed herein, and a pharmaceutically acceptable carrier, and further comprises a therapeutic agent useful for treatment of an IL-36-mediated disease or condition. In some embodiments, for example wherein the disease indication is cancer the therapeutic agent is a chemotherapeutic agent appropriate for the particular cancer. In some embodiments, the further therapeutic agent in the composition is an antagonist of an IL-1, IL-33, IL-36 signaling pathway. In other embodiments, the other therapeutic agent is given at the same time or sequentially as the anti-IL-36 antibody but in a different composition. It may be that the subject is one being treated, or who has been treated, with the other agent.

[0241] In some embodiments, the compositions or formulations of the present disclosure comprise an anti-IL-36 antibody as the sole active agent, wherein the anti-IL-36 antibody is a multispecific antibody that binds to each of human IL-36α, IL-36β, and IL-36γ with a binding affinity of 3 nM or less, optionally, wherein the binding affinity is measured by equilibrium dissociation constant (K_{D}) to a hu-IL-36α of SEQ ID NO:1, a hu-IL-36β of SEQ ID NO:2, and a hu-IL-36γ of SEQ ID NO:3. In some embodiments, the multispecific antibody comprises a specificity for IL-36α and/or IL-36γ in one arm, and a specificity for IL-36β in the other arm; optionally, wherein one arm binds to hu-IL-36α and hu-IL-36γ with a binding affinity of 1×10⁻⁹ M or less, 1×10⁻¹⁰ M or less, or 1×10⁻¹¹ M or less, and the other arm binds to hu-IL-36β with a binding affinity of 1×10⁻⁹ M or less, 1×10⁻¹⁰ M or less, or 1×10⁻¹¹ M or less.

[0242] In some embodiments, the compositions or formulations of the present disclosure comprise a single multispecific antibody that binds to each of human IL-36α, IL-36β, and IL-36γ with a binding affinity of 3 nM or less, and does not include any other anti-IL-36 antibody, or any other antibody capable of binding IL-36.

[0243] Pharmaceutically acceptable carriers are generally non-toxic to recipients at the dosages and concentrations employed. A wide range of such pharmaceutically acceptable carriers are well-known in the art (see e.g., Remington's Pharmaceutical Sciences 16th edition, Osol, A. Ed. (1980)). Exemplary pharmaceutically acceptable carriers useful in the formulations of the present disclosure can include, but are not limited to: buffers such as phosphate, citrate, and other organic acids; antioxidants including ascorbic acid and methionine; preservatives (such as octadecyldimethylbenzyl ammonium chloride; hexamethonium chloride; benzalkonium chloride; benzethonium chloride; phenol, butyl or benzyl alcohol; alkyl parabens such as methyl or propyl paraben; catechol; resorcinol; cyclohexanol; 3-pentanol; and m-cresol); low molecular weight (less than about 10 residues) polypeptides; proteins, such as serum albumin, gelatin, or immunoglobulins; hydrophilic polymers such as polyvinylpyrrolidone; amino acids such as glycine, glutamine, asparagine, histidine, arginine, or lysine; monosaccharides, disaccharides, and other carbohydrates including glucose, mannose, or dextrins; chelating agents such as EDTA; sugars such as sucrose, mannitol, trehalose or sorbitol; salt-forming counter-ions such as sodium; metal complexes (e.g., Zn-protein complexes); and/or non-ionic surfactants such as polyethylene glycol (PEG).

[0244] Pharmaceutically acceptable carriers useful in the formulations of the present disclosure can also include interstitial drug dispersion agents, such as soluble neutral-active hyaluronidase glycoproteins (sHASEGP) (see e.g., US Pat. Publ. Nos. 2005/0260186 and 2006/0104968), such as human soluble PH-20 hyaluronidase glycoproteins (e.g., rHuPH20 or HYLENEX®, Baxter International, Inc.).

[0245] Additional therapeutic agents and active ingredients may be entrapped in microcapsules prepared, for example, by coacervation techniques or by interfacial polymerization, for example, hydroxymethylcellulose or gelatin-microcapsules and poly-(methylmethacylate) microcapsules, respectively, in colloidal drug delivery systems (for example, liposomes, albumin microspheres, microemulsions, nano-particles and nanocapsules) or in macroemulsions. Such techniques are disclosed in Remington's Pharmaceutical Sciences 16th edition, Osol, A. Ed. (1980).

[0246] In some embodiments, the formulation can be a sustained-release preparation of the antibody and/or other active ingredients. Suitable examples of sustained-release preparations include semipermeable matrices of solid hydrophobic polymers containing the antibody, which matrices are in the form of shaped articles, e.g., films or microcapsules.

[0247] Typically, the formulations of the present disclosure to be administered to a subject are sterile. Sterile formulations may be readily prepared using well-known techniques, e.g., by filtration through sterile filtration membranes.

### IV. Uses and Methods of Treatment

[0248] It is contemplated that any of the compositions or formulations comprising an anti-IL-36 antibody of the present disclosure can be used for any methods or uses, such as in therapeutic methods, that utilize their ability to specifically bind to IL-36 and/or block the activity of IL-36, particularly blocking the ability of IL-36 to mediate intracellular signaling by the cytokines IL-36α, IL-36β, and/or IL-36γ. The intracellular signaling pathways mediated by IL-36 include at least the signaling pathways stimulated by the cytokine agonists IL-36α, IL-36β, and/or IL-36γ. Inhibition of the IL-36-mediated signaling pathways can be assayed in vitro using known cell-based blocking assays including the HEK-BLUE™ reporter cell assays and primary cell-based blocking assays described in the Examples of the present disclosure.

[0249] An IL-36 mediated disease can include any disease or condition associated with the aberrant function of the IL-1 family of cytokines for which IL-36R acts as a receptor including IL-36α, IL-36β, and/or IL-36γ. In some cases, such aberrant function is associated with elevated levels of IL-36α, IL-36β, and/or IL-36γ in bodily fluids or tissue, and can include, for example, levels that exceed those normally found in a particular cell or tissue or can be any detectable level in a cell or tissue that normally does not express these cytokines. Typically, IL-36 mediated conditions or diseases exhibit the following characteristics: (1) pathologies associated with the condition or disease can be experimentally induced in animals by administration of IL-36α, IL-36β, and/or IL-36γ, and/or by up-regulation of expression of IL-36α, IL-36β, and/or IL-36γ; and (2) pathologies associated with the condition or disease generated in experimental animal models can be inhibited by agents that are known to inhibit the action of IL-36α, IL-36β, and/or IL-36γ.

[0250] IL-36α, IL-36β, and/or IL-36γ are known to be pro-inflammatory cytokines, however, the aberrant function of the IL-36 signaling pathways stimulated by these cytokines as mediated by IL-36R, are known to be associated with a wide range of diseases and conditions generally including but not limited to inflammatory diseases, autoimmune diseases, respiratory diseases, metabolic disorders, infections, and cancers. For example, the range of conditions and diseases associated with aberrant function of IL-36 signaling, include but are not limited to: acute generalized exanthematous pustulosis (AGEP), chronic obstructive pulmonary disease (COPD), childhood pustular dermatosis, Crohn's disease, eczema, generalized pustular psoriasis (GPP), inflammatory bowel disease (IBD), palmoplantar pustular psoriasis (PPP), psoriasis, psoriatic arthritis, TNF-induced psoriasis form skin lesions in Crohn's patients, Sjogren's syndrome, systemic lupus erythematosus (SLE), ulcerative colitis, and uveitis.

[0251] Agents that target the IL-36 signaling pathways by blocking IL-36R are in clinical development for the treatment of a range of diseases and conditions, including but not limited to the following: GPP, PPP, and ulcerative colitis.

[0252] It is contemplated that any of the compositions or formulations comprising an anti-IL-36 antibody of the present disclosure can be used in a method or use for the treatment of any of the above-listed diseases or conditions associated with aberrant function of the IL-36 signaling pathway. Generally, these conditions and diseases include but are not limited to inflammatory diseases, autoimmune diseases, respiratory diseases, metabolic disorders, infections, and cancers.

[0253] Accordingly, in some embodiments, the compositions or formulations comprising an anti-IL-36 antibody of the present disclosure can be used in a method, therapy, medicament, diagnostic, or use for use in the treatment of a condition or disease selected from acne due to epidermal growth factor receptor inhibitors, acne and suppurative hidradenitis (PASH), acute generalized exanthematous pustulosis (AGEP), amicrobial pustulosis of the folds, amicrobial pustulosis of the scalp/leg, amicrobial subcorneal pustulosis, aseptic abscess syndrome, Behget's disease, bowel bypass syndrome, chronic obstructive pulmonary disease (COPD), childhood pustular dermatosis, Crohn's disease, deficiency of the interleukin-1 receptor antagonist (DIRA), deficiency of interleukin-36 receptor antagonist (DITRA), eczema, generalized pustular psoriasis (GPP), erythema elevatum diutinum, hidradenitis suppurativa, IgA pemphigus, inflammatory bowel disease (IBD), neutrophilic panniculitis, palmoplantar pustular psoriasis (PPP), psoriasis, psoriatic arthritis, pustular psoriasis (DIRA, DITRA), pyoderma gangrenosum, pyogenic arthritis pyoderma gangrenosum and acne (PAPA), pyogenic arthritis pyoderma gangrenosum acne and suppurative hidradenitis (PAPASH), rheumatoid neutrophilic dermatosis, synovitis acne pustulosis hyperostosis and osteitis (SAPHO), TNF-induced psoriasis form skin lesions in Crohn's patients, Sjogren's syndrome, Sweet's syndrome, systemic lupus erythematosus (SLE), ulcerative colitis, and uveitis.

[0254] As disclosed herein, including in the Examples below, the anti-IL-36 antibodies of the present disclosure have the ability to decrease, inhibit, and/or block intracellular signaling mediated by IL-36. Accordingly, in some embodiments, the present disclosure provides a method of treating a IL-36-mediated disease or condition in a subject, the method comprising administering to the subject a therapeutically effective amount of an anti-IL-36 antibody of the present disclosure or administering to a subject in need thereof a therapeutically effective amount of a pharmaceutical composition comprising an anti-IL-36 antibody of the present disclosure and a pharmaceutically acceptable carrier.

[0255] As disclosed elsewhere herein, the anti-IL-36 antibodies of the present disclosure have the ability to decrease, inhibit, and/or block the IL-36 signaling pathways. Accordingly, the present disclosure also provides methods of treating diseases and conditions responsive to a decrease, inhibition, and/or blocking of the IL-36 signaling pathways.

[0256] Additionally, the anti-IL-36 antibodies of the present disclosure have the ability to decrease, inhibit, and/or block intracellular signaling stimulated by the agonists IL-36α, IL-36β, and/or IL-36γ. Accordingly, the present disclosure also provides methods of treating diseases and conditions responsive to a decrease, inhibition, and/or blocking of intracellular signaling stimulated by the agonists IL-36α, IL-36β, and/or IL-36γ.

[0257] The IL-1 family cytokines, including the IL-36 cytokines, IL-36α, IL-36β, and/or IL-36γ, are involved in inflammatory immune responses that affect tumor formation and the development of many forms of cancer. Accordingly, in some embodiments, the present disclosure provides a method of treating cancer in a subject, the method comprising administering to the subject in need thereof a therapeutically effective amount of an anti-IL-36 antibody of the present disclosure or administering to a subject a therapeutically effective amount of a pharmaceutical composition comprising an anti-IL-36 antibody of the present disclosure and a pharmaceutically acceptable carrier.

[0258] The IL-36 signaling pathways have been associated with psoriasis. Accordingly, in some embodiments, the present disclosure provides a method of treating psoriasis in a subject, the method comprising administering to the subject in need thereof a therapeutically effective amount of an anti-IL-36 antibody of the present disclosure or administering to a subject a therapeutically effective amount of a pharmaceutical composition comprising an anti-IL-36 antibody of the present disclosure and a pharmaceutically acceptable carrier.

[0259] In some embodiments, the present disclosure provides a method of treating and/or preventing a IL-36-mediated disease, a IL-36 signaling pathway mediated disease, and/or a disease mediated by intracellular signaling stimulated by the agonists IL-36α, IL-36β, and/or IL-36γ. In such method of treatment embodiments, the method comprises administering to a subject in need thereof, a therapeutically effective amount of an anti-IL-36 antibody, or a composition or pharmaceutical formulation comprising an anti-IL-36 antibody as described herein. Administration of the antibody, composition, or pharmaceutical formulation in accordance with the method of treatment provides an antibody-induced therapeutic effect that protects the subject from and/or treats the progression of an IL-36-mediated disease in a subject.

[0260] In some embodiments, the anti-IL-36 antibody is the sole active agent that is administered to the subject. In some embodiments wherein the anti-IL-36 antibody is the sole active agent, the anti-IL-36 antibody is a multispecific antibody that binds to each of human IL-36α, IL-36β, and IL-36γ with a binding affinity of 3 nM or less. Such a method that uses a single anti-IL-36 antibody as the sole active agent provides an advantage over methods that require the use of multiple anti-IL-36 antibodies (e.g., a composition comprising a mixture of two or more different antibodies that bind to IL-36α, IL-36β, and/or IL-36γ), and/or other antibodies that bind to other antigens. The ability to bind all three IL-36 antigens with a single antibody allows for administration of a single composition or formulation, including a single dose or multiple doses of a single composition or formulation, to the subject. Additionally, it is contemplated that the number of doses administered using the multispecific antibody is fewer that when administering multiple different anti-IL-36 antibodies or mixtures of anti-IL-36 and/or other antibodies.

[0261] In some embodiments, the method of treatment can further comprise administration of one or more additional therapeutic agents or treatments known to those of skill in the art to prevent and/or treat the IL-36-mediated disease or condition. Such methods comprising administration of one or more additional agents can encompass combined administration (where two or more therapeutic agents are included in the same or separate formulations), and separate administration, in which case, administration of the antibody composition or formulation can occur prior to, simultaneously, and/or following, administration of the additional therapeutic agent.

[0262] In some embodiments of the methods of treatment of the present disclosure, the anti-IL-36 antibody or pharmaceutical formulation comprising an anti-IL-36 antibody is administered to a subject by any mode of administration that delivers the agent systemically, or to a desired target tissue. Systemic administration generally refers to any mode of administration of the antibody into a subject at a site other than directly into the desired target site, tissue, or organ, such that the antibody or formulation thereof enters the subject's circulatory system and, thus, is subject to metabolism and other like processes.

[0263] Accordingly, modes of administration useful in the methods of treatment of the present disclosure can include, but are not limited to, injection, infusion, instillation, and inhalation. Administration by injection can include intravenous, intramuscular, intraarterial, intrathecal, intraventricular, intracapsular, intraorbital, intracardiac, intradermal, intraperitoneal, transtracheal, subcutaneous, subcuticular, intraarticular, subcapsular, subarachnoid, intraspinal, intracerebro spinal, and intrasternal injection and infusion. Administration may be, for instance, by intravenous infusion, intravenous bolus, subcutaneous, or subcutaneous bolus. In one embodiment administration is systemic. In another embodiment administration is localized. In one embodiment an anti-IL-36 antibody is provided in a form to facilitate administration. For instance, the antibody may be provided in unit dose form. In one preferred embodiment the antibody may be provided in a prefilled syringe, for example a pre-filled syringe comprising a pharmaceutical composition comprising an antibody of the invention. In one preferred embodiment the invention provides an auto-injector comprising an antibody of the invention and in particular a pharmaceutical composition of the invention. A pen delivery device comprising an antibody of the invention and in particular a pharmaceutical compositions of the invention is also provided. It may be such devices are disposable. In other embodiments they may be reusable. The invention also provides a cartridge or reservoir comprising a pharmaceutical composition of the invention, for instance one for any of the delivery devices disclosed herein. In one embodiment the antibody of the invention is provided via controlled release, for instance in one preferred embodiment in a pump device. In another embodiment, an intravenous bag is provided containing a liquid pharmaceutical composition comprising an antibody of the invention. In another preferred embodiment, the antibody may be provided in a form that facilitates transport, for instance in a container, for instance in a vial, comprising the antibody in lyophilized form. In another embodiment, the antibody is provided in a container, for instance a vial, in liquid form suitable for direct administration to a subject.

[0264] Examples of pen devices which may be provided loaded with a pharmaceutical composition of the invention include, but are not limited to AUTOPEN™ (Owen Mumford, Inc., Woodstock, UK), DISETRONIC™ pen (Disetronic Medical Systems, Bergdorf, Switzerland), HUMALOG MIX 75/25™ pen, HUMALOG™ pen, HUMALIN 70/30™ pen (Eli Lilly and Co., Indianapolis, Ind.), NOVOPEN™ I, II and III (Novo Nordisk, Copenhagen, Denmark), NOVOPEN JUNIOR™ (Novo Nordisk, Copenhagen, Denmark), BD™ pen (Becton Dickinson, Franklin Lakes, N.J.), OPTIPEN™, OPTIPEN PRO™, OPTIPEN STARLET™, and OPTICLIK™ (sanofi-aventis, Frankfurt, Germany), to name only a few. Examples of disposable pen delivery devices having applications in subcutaneous delivery of a pharmaceutical composition of the present disclosure include, but are not limited to the SOLOSTAR™ pen (sanofi-aventis), the FLEXPEN™ (Novo Nordisk), and the KWIKPEN™ (Eli Lilly), the SURECLICK™ Autoinjector (Amgen, Thousand Oaks, Calif.), the PENLET™ (Haselmeier, Stuttgart, Germany), the EPIPEN (Dey, L.P.), and the HUMIRA™ Pen (Abbott Labs, Abbott Park Ill.). Examples of In certain situations, the pharmaceutical composition can be delivered in a controlled release system. In one embodiment, a pump may be used (see Langer, supra; Sefton, 1987, CRC Crit. Ref. Biomed. Eng. 14:201). In another embodiment, polymeric materials can be used; see, Medical Applications of Controlled Release, Langer and Wise (eds.), 1974, CRC Pres., Boca Raton, Fla. In yet another embodiment, a controlled release system can be placed in proximity of the composition's target, thus requiring only a fraction of the systemic dose (see, e.g., Goodson, 1984, in Medical Applications of Controlled Release, supra, vol. 2, pp. 115-138). Other controlled release systems are discussed in the review by Langer, 1990, Science 249:1527-1533.

[0265] In some embodiments, a pharmaceutical formulation of the anti-IL-36 antibody is formulated such that the antibody is protected from inactivation in the gut. Accordingly, the method of treatments can comprise oral administration of the formulation.

[0266] In some embodiments, use of the compositions or formulations comprising an anti-IL-36 antibody of the present disclosure as a medicament are also provided. Additionally, in some embodiments, the present disclosure also provides for the use of a composition or a formulation comprising an anti-IL-36 antibody in the manufacture or preparation of a medicament, particularly a medicament for treating, preventing or inhibiting an IL-36-mediated disease. In a further embodiment, the medicament is for use in a method for treating, preventing or inhibiting an IL-36-mediated disease comprising administering to an individual having an IL-36-mediated disease an effective amount of the medicament.

[0267] In some embodiments, the compositions and formulations useful as a medicament or in the preparation of a medicament comprise an anti-IL-36 antibody as the sole active agent. In some embodiments, the anti-IL-36 antibody useful as a medicament or in the preparation of a medicament is a multispecific antibody that binds to each of human IL-36α, IL-36β, and IL-36γ with a binding affinity of 3 nM or less. In such embodiments, the use of a single, multispecific, anti-IL-36 antibody as the sole active agent in a medicament, or in the preparation of a medicament, provides a distinct advantage over uses that require multiple anti-IL-36, or other antibodies. The use of a single multispecific anti-IL-36 antibody comprising binding specificities for IL-36α, IL-36β, and IL-36γ allows for simplified uses because only a single active agent is included in the composition or formulation is used.

[0268] In certain embodiments, the medicament further comprises an effective amount of at least one additional therapeutic agent, or treatment.

[0269] In a further embodiment, the medicament is for use in treating, inhibiting or preventing an IL-36-mediated disease in a subject comprising administering to the subject an amount effective of the medicament to treat, inhibit or prevent the IL-36-mediated disease.

[0270] For the prevention or treatment of a IL-36-mediated disease or condition, the appropriate dosage of the anti-IL-36 antibody contained in the compositions and formulations of the present disclosure (when used alone or in combination with one or more other additional therapeutic agents) will depend on the specific disease or condition being treated, the severity and course of the disease, whether the antibody is administered for preventive or therapeutic purposes, the previous therapy administered to the patient, the patient's clinical history and response to the antibody, and the discretion of the attending physician. The anti-IL-36 antibody included in the compositions and formulations described herein, can be suitably administered to the patient at one time, or over a series of treatments. Various dosing schedules including but not limited to single or multiple administrations over various time-points, bolus administration, and pulse infusion are contemplated herein.

[0271] Depending on the type and severity of the disease, about 1 μg/kg to 15 mg/kg of anti-IL-36 antibody in a formulation of the present disclosure is an initial candidate dosage for administration to a human subject, whether, for example, by one or more separate administrations, or by continuous infusion. Generally, the administered dosage of the antibody would be in the range from about 0.05 mg/kg to about 10 mg/kg. In some embodiments, one or more doses of about 0.5 mg/kg, 2.0 mg/kg, 4.0 mg/kg or 10 mg/kg (or any combination thereof) may be administered to a patient.

[0272] Dosage administration can be maintained over several days or longer, depending on the condition of the subject, for example, administration can continue until the IL-36-mediated disease is sufficiently treated, as determined by methods known in the art. In some embodiments, an initial higher loading dose may be administered, followed by one or more lower doses. However, other dosage regimens may be useful. The progress of the therapeutic effect of dosage administration can be monitored by conventional techniques and assays.

[0273] Accordingly, in some embodiments of the methods of the present disclosure, the administration of the anti-IL-36 antibody comprises a daily dosage from about 1 mg/kg to about 100 mg/kg. In some embodiments, the dosage of anti-IL-36 antibody comprises a daily dosage of at least about 1 mg/kg, at least about 5 mg/kg, at least about 10 mg/kg, at least about 20 mg/kg, or at least about 30 mg/kg.

[0274] The invention may be employed for any suitable subject. In one preferred embodiment, the subject is human. In one embodiment, the subject is male. In one embodiment the subject is female. The invention may be employed with subjects of any age. In one embodiment the subject is a baby, a toddler, an adolescent, a teenager, or an adult. For example, the subject may be at least six months in age, preferably at least one year old, more preferably at least five years in age, and even more preferably at least ten years in age. The subject may be at least 18 years in age. In one embodiment, the subject is from 0 to 100 years of age. In another embodiment, the subject is from 10 to 85 years in age. In another embodiment, the subject is from six months to 18 years in age.

[0275] Additionally, the anti-IL-36 antibodies of the present disclosure may be used in assay methods for the detection of IL-36. Due to their ability to bind human IL-36 with high affinity, the anti-IL-36 antibodies disclosed herein are appropriate for a wide range of assay methods and formats. It is contemplated that the anti-IL-36 antibodies can be employed in any known assay method, such as competitive binding assays, direct and indirect sandwich assays, immunoprecipitation assays and enzyme-linked immunosorbent assays (ELISA) (See, Sola, 1987, Monoclonal Antibodies: A Manual of Techniques, pp. 147-158, CRC Press, Inc.) for the detection and quantitation of IL-36. Accordingly, in some embodiments, the present disclosure provides a method for detecting the level of IL-36 in a biological sample, the method comprising the step of contacting the sample with an anti-IL-36 antibody as disclosed herein. Further, in some embodiments, it is contemplated that the method of detecting the level of IL-36 in a biological sample can be used for detecting and/or diagnosing an IL-36-mediated condition or disease in a biological sample, e.g., from a human subject.

[0276] The present invention also provides a kit comprising an antibody of the invention. For instance, the present invention comprises a kit comprising any of the products discussed herein comprising an antibody of the invention, such as a container comprising a pharmaceutical composition of the invention. In one preferred embodiment, the kit comprises a syringe, auto-injector, pen, intravenous bag, or vial comprising an antibody of the invention. A kit of the invention may also comprise instructions for administering the antibody. The present invention also provides a kit comprising an antibody of the invention for use in detecting IL-36, for instance in use in diagnosis. In one embodiment, such a kit may also comprise a positive and/or a negative control and may also comprise instructions.

### EXAMPLES

[0277] Various features and embodiments of the disclosure are illustrated in the following representative examples, which are intended to be illustrative, and not limiting. Those skilled in the art will readily appreciate that the specific examples are only illustrative of the invention as described more fully in the claims which follow thereafter. Every embodiment and feature described in the application should be understood to be interchangeable and combinable with every embodiment contained within.

### Example 1: Generation of IL-36 Polypeptides

[0278] This example illustrates the preparation of the various IL-36 polypeptide constructs used as antigens in eliciting and screening the anti-IL-36 antibodies of the present disclosure.

[0279] The active, N-terminally truncated forms of human IL-36α, IL-36β, IL-36γ, IL-36Ra (hu-IL-36α, hu-IL-36β, hu-IL-36γ, hu-IL-36Ra) and cynomolgus monkey IL-36α, IL-36β, IL-36γ (cy-IL-36α, cy-IL-36β, cy-IL-36γ) were produced recombinantly based upon information in Towne et al., (2011). The amino acid sequence boundaries of the expression constructs are provided above in Table 1 and the accompanying Sequence Listing. All of the recombinant IL-36α and IL-36β polypeptide constructs had an N-terminal “12×His-SUMO” tag for purification purposes (SEQ ID NO: 8). The construct of IL-36γ had the following “12×His-TEV” N-terminal tag for purification purposes: HHHHHHHHHHHHENLYFQS (SEQ ID NO: 9). The construct of IL-36Ra had the following C-terminal “GS-TEV-GS-huIgGlFc-FLAG” tag for purification purposes (SEQ ID NO: 12) along with an N-terminal secretion signal sequence for mammalian cell expression: MGWSCIILFLVATATGVHS (SEQ ID NO: 11). As noted elsewhere herein, for some applications, the IL-36 constructs included the following C-terminal “GS-AviTag” (IL-36-Avi) for detection or capture purposes: GGGGSGLNDIFEAQKIEWHE (SEQ ID NO: 10).

[0280] The IL-36 construct proteins were expressed in One Shot BL21(DE3) Chemically Competent E. coli (Thermo Fisher, Waltham, Mass., USA) according to the manufacturer's protocol. Standard IPTG (1 mM) induction protocols were performed in LB broth with Kanamycin (25 ug/mL) selection. Following induction, cells were grown at 25 degrees Celsius for 20-24 hours and harvested as pellets. Standard sonication procedures in lysozyme (100 ug/mL) and protease inhibitors were performed to extract soluble protein from E. coli pellets. Clarified supernatants were supplemented with 20 mM imidazole pH 7.5 and applied to HisTrap FF crude columns (GE Healthcare, Chicago, Ill., USA) equilibrated in 20 mM Tris-HCl, 150 mM NaCl (TBS), 20 mM imidazole pH 7.5. Proteins were eluted with a 10 CV gradient to 100% TBS, 500 mM imidazole pH 7.5. Mature forms of IL-36 protein constructs were generated after cleaving N-terminal fusion tags with either His-SUMO protease (Thermo Fisher, Waltham, Mass., USA) or His-TEV protease (ATUM, Newark, Calif., USA) according to the manufacturer's protocol with the following modifications: SUMO protease was pre-treated with 10 mM DTT for 5 minutes and then used in reactions (˜0.02 units per μg substrate) containing TBS pH 7.5 with 10 mM DTT at 25 degrees Celsius for 18-24 hours; TEV protease was used in reactions (50 μg/mL) at 25 degrees Celsius for 2 hours. Following protease treatment, affinity purification was performed using HisTrap FF columns to remove the cleaved tags, and flow-through fractions were retained and then loaded onto Superdex 75 increase columns (GE Healthcare, Chicago, Ill., USA). Peak fractions containing monomeric protein were pooled and stored in 25 mM HEPES, 150 mM NaCl (HBS), pH 7.5, 0.02% NaN₃.

[0281] The C-terminal Fc-fused IL-36Ra protein was expressed in Expi293F cells (Thermo Fisher Scientific, Waltham, Mass., USA) according to the manufacturer's protocol. Cells were harvested after 6 days and the clarified supernatant was applied to MabSelect SuRe columns (GE Healthcare, Chicago, Ill., USA) equilibrated in TBS. Protein was eluted in 20 mM citrate pH 2.95, 150 mM NaCl (CBS) and immediately neutralized with 1/25 volume 1.5 M Tris-HCl pH 8.8. The C-terminal Fc tag was removed using His-TEV protease as previously described, followed by affinity purification using a combination of HisTrap FF and MabSelect SuRe columns to remove the purification tags and His-TEV protease. Subsequent purification of the flow-through fraction proceeded as previously described for IL-36 proteins.

[0282] For some applications IL-36 proteins were biotinylated randomly or site-specifically. For random biotinylation of IL-36 proteins, NHS-PEG4-biotin (Thermo Fisher, Waltham, Mass., USA) was used according to the manufacturer's instructions. For site-specific biotinylation of IL-36-Avi proteins, E. coli were co-transformed with plasmids expressing IL-36-Avi and BirA biotin ligase (pBirAcm plasmid from Avidity, Aurora, Colo., USA). IPTG inductions were carried out as previously described with the addition of Chloramphenicol (10 ug/mL) during the starter culture step for double-selection with the BirA gene and 50 uM d-biotin during the induction step for in-vivo biotinylation.

### Example 2: Generation of Anti-Human IL-36 Antibodies Using Yeast Display Methods, Screening and Selection for Further Characterization

### A. SELECTION OF ANTI-Hu-IL-36 ANTIBODIES BY YEAST DISPLAY

[0283] Human IL-36α (BioLegend), human IL-36β(Novus) and human IL-36γ (Novus) were commercially obtained as N-terminally truncated (active) forms. For yeast selection and screening purposes, these IL-36 proteins were biotinylated using NHS-PEG4-Biotin (Pierce) or labeled with Dylight-650 using NHS-4×PEG-Dylight-650 (Thermo Scientific) according to the manufacturers' protocols aiming for a ratio of label:protein of between 1-3 to 1.

[0284] Antibodies recognizing hu-IL-36 were generated using human antibody libraries displayed on the surface of yeast (U.S. Pat. No. 10,011,829). Yeast display libraries were generated to display Fab fragments based on 5 VH, 4Vκ and one Vλ gene segments according to the methods described in U.S. Pat. No. 10,011,829, which is hereby incorporated by reference herein in its entirety. 25 sub-libraries were rationally designed in order to improve amino acid diversity in the CDRs while retaining the germline sequences in the antibody framework regions. The amino acid usage in the engineered CDRs was matched to that observed for those variable region subfamilies in a human antibody database generated from a deep sequencing dataset with over 350,000 naturally occurring human antibody clones. The methods for using the libraries to identify antibodies capable of binding hu-IL-36, including methods for amplifying the libraries or yeast cells harvested from an enrichment or sorting process and induction of antibody expression on the surface of yeast for FACS sorting with antigens, were carried out as described in U.S. Pat. No. 10,011,829.

[0285] The master human antibody library comprised of individual libraries based on different VH-Vκ or VH-Vλ combinations was split into two pools (libraries 1-13 and libraries 14-25) to enable efficient initial enrichment for clones recognizing hu-IL-36 by magnetic-activated cell sorting (MACS). The libraries were grown up to 3-fold the original library titer and induced for antibody expression by growing the yeast with induction medium containing 2% galactose at 20° C. Three rounds of MACS were performed and harvested cells from each round were amplified such that 10-fold the number of yeast cells harvested was used for the next round of MACS.

[0286] For MACS selection biotinylated hu-IL-36α, hu-IL-36β and hu-IL-36γ proteins were pooled together. In three successive rounds of MACS enrichment, each library yeast cell pool was incubated with 300 nM each of biotinylated hu-IL-36α, hu-IL-36β and hu-IL-36γ. After incubation at 4° C. with rotation for 2 hours, cells were washed and 3 mL of streptavidin-coated magnetic beads (Miltenyi Biotec, Auburn, Calif.) were added to each pool. After 1 hour incubation at 4° C. with rotation, antigen-binding cells were sorted by magnetic activated bead sorting using LS columns (Miltenyi Biotec, Auburn, Calif.). The harvested cells from the two library pools were collected, pooled, amplified 10-fold overnight and then subjected to a second MACS selection that included a pre-clearing depletion with baculovirus and streptavidin-coated beads before incubating the remaining yeast cells with 300 nM of each of the 3 biotinylated hu-IL-36 cytokines. The percent of the input pool harvested from the third round of MACS was 9.7%.

[0287] Prior to performing FACS sorting experiments to identify high-affinity yeast clones for hu-IL-36 proteins, different binding buffers were tested to minimize non-specific binding. The best binding buffer for hu-IL-36α and hu-IL-36β was PBS containing 0.5% bovine serum albumin (VWR Life Science, Radnor, Pa., USA), whereas experiments with hu-IL-36γ required PBS containing filtered, solubilized 5% dried milk (LabScientific, Highlands, N.J., USA) to minimize background binding.

[0288] FACS1 was performed using 150 nM of each PEG4-biotin-IL-36 cytokine in separate aliquots containing the selected binding buffer and using streptavidin-PE as a secondary detection reagent. Antigen-positive cells were collected, amplified 10-fold and used for two additional rounds of FACS (FACS2 and FACS3) using hu-IL-36 proteins labeled with PEG-Dylight-650 and the same buffer conditions as in FACS1. The percent antigen-positive cells harvested in FACS3 were 2.3% for hu-IL-36α, 1.0% for hu-IL-36β, and 11.4% for hu-IL-36γ. 0.2% of the antigen-positive cells with the highest mean fluorescence intensity were plated and individual clones were picked into deep-well plates and cultured for 48 hours with induction media to induce secretion of Fab fragments into the culture supernatant. Yeast cultures were harvested, cells removed by centrifugation and Fab-containing supernatants were then tested for binding activity to their respective antigens by ELISA.

[0289] For ELISAs with yeast culture supernatants, 96-well ELISA plates were coated with 250 ng/well neutravidin, blocked with PBS containing 0.5% BSA (“blocking buffer”) and then 250 ng of biotinylated hu-IL-36α, hu-IL-36β or hu-IL-36γ was added per well. After washing, 20 μL culture media and 30 μL blocking buffer was added, the plates incubated with rocking for 1 hour at room temperature, washed and bound Fab detected with anti-human-Fab HRP. The majority of clones from these single cytokine sorts exhibited binding activity to the hu-IL-36 cytokine they were selected against in this primary ELISA. In secondary ELISAs testing binding activity for all three hu-IL-36 cytokines, clones that bound to both hu-IL-36α and hu-IL-36γ (but not hu-IL-36β) were observed. Therefore, two FACS sorting strategies were pursued to identify hu-IL-36α/γ-crossreactive clones.

### Identification and Selection of Hu-IL-36α/Hu-IL-36γ-Crossreactive Antibodies

[0290] In the first sorting strategy used to select clones that could recognize both hu-IL-36α and hu-IL-36γ, cells obtained in FACS3 with 150 nM PEG-Dylight-650-huIL-36α (2.3% antigen-positive) were amplified 10-fold and sorted with 100 nM PEG4-biotin-IL-36α, yielding 15.5% antigen-positive cells (FACS4). These cells were amplified and stained with 100 nM PEG-Dylight-650-huIL-36γ, yielding 29.1% antigen-positive cells (FACS5AG). Cells collected in FACS5AG were amplified 10-fold and stained with 10 nM PEG-Dylight-650-huIL-36γ and 10 nM PEG4-biotin-IL-36α (detected with streptavidin-PE), yielding 7.3% IL-36α/T-double-positive cells (FACS6AG). Cells collected in FACS6AG were amplified 10-fold and stained with 10 nM PEG-Dylight-650-huIL-36α and 10 nM PEG4-biotin-IL-36γ (detected with streptavidin-PE), yielding 1.0% IL-36α/γ-double-positive cells (FACS7AG).

[0291] In the second sorting strategy used to select clones that could recognize both hu-IL-36α and hu-IL-36γ, cells obtained in FACS3 with 150 nM PEG-Dylight-650-huIL-36γ(11.4% antigen-positive) were amplified 10-fold and sorted with 100 nM PEG4-biotin-IL-36α, selecting antigen-positive cells (FACS4GA). These cells were amplified and stained with 100 nM PEG-Dylight-650-huIL-36α and 100 nM PEG4-biotin-IL-36γ (detected with streptavidin-PE), yielding 1.0% IL-36α/γ-double-positive cells (FACS5GA). Cells collected in FACS5GA were amplified 10-fold and stained with 100 nM PEG4-biotin-huIL-36α (detected with streptavidin-PE) and 100 nM PEG-Dylight-650-huIL-36γ, yielding 8.0% IL-36α/γ-double-positive cells (RFACS6GA). Cells collected in RFACS6GA were amplified 10-fold and stained with 100 nM PEG-Dylight-650-huIL-36α and 100 nM PEG4-biotin-IL-36γ (detected with streptavidin-PE), yielding 1.3% IL-36α/γ-double-positive cells (RFACS7GA).

[0292] 0.2% of the IL-36α/γ-double-positive cells from FACS7AG and RFACS7GA with the highest mean fluorescence intensity were plated, individual clones were picked and cultured, and Fab-containing supernatants were then tested for binding activity to hu-IL-36α and hu-IL-36γ by ELISA as described above. 87 clones that bound both hu-IL-36α and hu-IL-36γ were selected for sequencing.

[0293] To obtain the antibody sequence for the selected yeast clones, plasmid DNA was extracted from the yeast clones and used for PCR using a forward primer that binds to the yeast promoter region and reverse primers that bind to the constant region of the human IgG1-CH1 region for the heavy chain and the constant region of the kappa or lambda chain for the light chain. The PCR products were then sequenced by Sanger sequencing using the same primers used for the PCR reaction.

[0294] The 87 hu-IL-36α/γ cross-reactive clones represented 30 unique clones by sequence.

### Identification and Selection of Hu-IL-36P-Reactive Antibodies

[0295] In the sorting strategy used to select clones that could recognize hu-IL-36β, cells obtained in FACS3 with 150 nM PEG-Dylight-650-huIL-36β (1.0% antigen-positive) were amplified 10-fold and sorted with 100 nM PEG4-biotin-IL-36β and detected with streptavidin-PE, yielding 13.1% antigen-positive cells (FACS4B). These cells were amplified and stained with 20 nM PEG-Dylight-650-huIL-36β, yielding 5.8% IL-36β-positive cells (FACS5B).

[0296] 0.2% of the IL-36β-positive cells from FACS5B with the highest mean fluorescence intensity were plated, individual clones were picked and cultured, and Fab-containing supernatants were then tested for binding activity to their respective antigens by ELISA as described above. The majority of the clones from this sort exhibited binding activity to IL-36β.

[0297] A total of 83 IL36BS7 clones were sequenced as described above, yielding 8 unique clones.

### B. In Vitro Screening of Yeast Cell Supernatants Containing Anti-Hu-IL-36 Antibodies

[0298] Cell supernatants from yeast clones of interest were tested for binding to human IL-36 by ELISA as described above. To compare the binding of these supernatants to human and cynomolgus monkey IL-36, IL-36 proteins were coated at 2.5 μg/mL on 96-well Nunc MaxiSorp plates (Thermo Fisher) and the plates blocked with 5% goat serum in PBS. Yeast supernatants were diluted 1:1 with PBST containing 1% w/v BSA and added to the ELISA plates for 1-1.5 hours with agitation. Bound Fab was detected by incubating the plates with F(ab′)2-HRP (Jackson ImmunoResearch). The ELISAs were developed for 3-10 minutes by addition of 50 μL/well of tetramethylbenzidine (TMB) microwell peroxidase substrate (Scytek Laboratories, Inc., Logan, Utah, USA) and enzymatic color development was stopped by acidification with 50 L/well of 2 N H₂SO₄ (Sigma-Aldrich Corporation, St. Louis, Mo., USA). The optical density of the samples at a wavelength of 450 nm (OD450) was analyzed with a SpectraMax i3X plate reader (Molecular Devices LLC, San Jose, Calif., USA). To estimate the relative affinity of each clone for cynomolgus monkey IL-36 and human IL-36 in this assay, a ratio of OD450 (OD450_{cyIL-36}/OD450_{huIL-36}) was calculated for each clone and IL-36 cytokine. Eight anti-IL-36 Fab clones (mAb1.0-mAb8.0) were selected for further characterization and results are shown in Table 3.

TABLE 3
BINDING OF SELECTED ANTI-IL-36 FABS TO hu-IL-36 AND
CY-IL-36 BY ELISA

| | ELISA OD₄₅₀ | | | ELISA OD₄₅₀cyIL-36/ | | |
|---|---|---|---|---|---|---|
| | hu-IL- | hu-IL- | hu-IL- | OD₄₅₀hu-IL-36 | | |
| Antibody | 36α | 36β | 36γ | IL-36α | IL-36β | IL-36γ |
| mAb1.0 | 0.9398 | 0.0523 | 2.4295 | 0.6 | N.T. | 1.3 |
| mAb2.0 | 2.5315 | 0.0604 | 2.5023 | 0.7 | N.T. | 1.2 |
| mAb3.0 | 1.6265 | 0.1097 | 2.1116 | 0.5 | N.T. | 1.0 |
| mAb4.0 | 2.1644 | 0.0513 | 2.2984 | 0.5 | N.T. | 1.2 |
| mAb5.0 | 2.0511 | 0.1285 | 2.077 | 0.5 | N.T. | 1.0 |
| mAb6.0 | 0.0638 | 2.3414 | 0.0656 | N.T. | 4.0 | N.T. |
| mAb7.0 | 0.0604 | 2.5818 | 0.0724 | N.T. | 3.9 | N.T. |
| mAb8.0 | 0.0698 | 2.6319 | 0.073 | N.T. | 0.1 | N.T. |

N.T. = not tested

### C. Cell-Based Assay to Determine Blocking Potency of Fab Supernatants

[0299] HEK-Blue cell lines, described in this and the following examples, use the HEK-293 cell line (human embryonic kidney epithelial cells) as the original parental lineage. The HEK-Blue IL-1/IL-33 sensor cells, were obtained from InvivoGen (InvivoGen, San Diego, Calif., USA; catalog #hkb-il33). These IL-1/IL-33 sensor cells were generated by stable transfection of HEK-Blue IL-10 sensor cells (InvivoGen; catalog #hkb-illb) with the human ST2 gene expressing the IL-33 receptor ST2. HEK-Blue IL-10 cells express an NF-κB/AP-1 SEAP (secreted embryonic alkaline phosphatase) reporter gene and contain an inactivated TNF-α response to ensure SEAP production is representative of IL-1 or IL-33 pathway activation. The HEK-Blue IL-1/IL-33 responsive cells were maintained according to manufacturer guidelines. Briefly, the cells were maintained in a standard growth medium consisting of DMEM (Corning, Inc., Corning, N.Y., USA), supplemented with 10% fetal bovine serum (FBS) (Atlanta Biologicals, Inc., Flowery Branch, Ga., USA), 100 IU/mL penicillin and 100 μg/mL streptomycin. The growth medium was further supplemented with 100 μg/mL zeocin to maintain the plasmid coding for SEAP, 200 g/mL hygromycin B to maintain IL-1 specificity and 100 μg/mL blasticidin to maintain the plasmid encoding ST2. The plasmid containing the human IL1RL2 gene, encoding the IL-36 receptor, was generated by AvantGen (custom order). HEK-Blue IL-1/IL-33 sensor cells were transiently transfected using LyoVec (InvivoGen) according to manufacturer guidelines. Briefly, LyoVec-DNA complexes were added directly to cells suspended in standard growth medium, at a concentration that would produce a minimum of 80% confluency 24 hours post-transfection, and immediately plated on 96-well, flat-bottom plates. 24 hours post-transfection, the cells were used within a standard HEK-Blue SEAP assay.

[0300] An agonist dose-response curve, consisting of a serial dilution series, was generated to provide an estimate of the half maximal effective concentration (EC₅₀) of agonist to be used in the assay. The following commercially available human cytokines were used as agonists in some HEK-Blue assays: IL-36α (BioLegend), IL-36β(Novus Biologicals) and IL-36γ (Novus Biologicals). 24 hours prior to experimental use, the transiently transfected cells were plated on 96-well, flat-bottom plates at a concentration resulting in a minimum of 80% confluency at the time of use. The desired agonist was added to the cells to a final volume 200 μL and the cells incubated for 24 hours at 37° C. with 5% CO₂. SEAP production was quantified using a SEAP detection assay. The SEAP detection medium QUANTI-Blue (InvivoGen) was used to determine the level of SEAP within the various conditions indicated and per general manufacturer guidelines. Specifically, 20 μL of cell culture supernatant (collected 24 hours post-agonist addition) was added to 130 μL of QUANTI-Blue detection medium. The reaction was allowed to proceed for one hour at 37° C., at which point a SpectraMax (Molecular Devices) spectrophotometer was used to measure the absorbance at a wavelength of 650 nm in conjunction with SoftMax Pro software (Molecular Devices). The raw assay data was analyzed using GraphPad Prism 7 software to perform a non-linear regression determination of the agonist EC₅₀ value in the assay.

[0301] HEK-Blue SEAP assays of non-purified anti-hu-IL-36 Fab fragments in yeast cell culture supernatant (SN) were performed as described above but with the following modifications. Non-purified, yeast cell culture SN containing the anti-hu-IL-36 Fab fragments was concentrated 20-fold and buffer-exchanged into PBS (1:20) to reduce background noise in the HEK-Blue SEAP assay. 40 μL of PBS and 10 μL of concentrated and buffer-exchanged yeast cell culture SN containing the anti-hu-IL-36 Fab fragments was added to HEK-Blue IL-1/IL-33 cells transfected with IL-36R. The cells and antibody-containing hybridoma cell culture SN were incubated for one-hour at 37° C. with 5% CO₂. Following the one-hour antibody incubation, the agonist was added to the wells containing the cells and antibodies at 4× the desired concentration, and in a manner resulting in 1× the final desired concentration within a total volume of 200 μL. The percent inhibition was calculated by determining the ratio of the absorbance value obtained from the sample (in this case anti-hu-IL-36 antibody-containing yeast cell culture SN) in relation to the positive control (cells exposed to the agonist only in the presence of yeast cell culture SN containing an irrelevant Fab) and multiplying this ratio by 100.

[0302] The results for the 8 anti-IL-36 Fab clones (mAb1.0-mAb8.0) selected for further characterization are shown in Table 4 below. The sequences for the selected clones are also disclosed in Table 2 and the accompanying Sequence Listing.

TABLE 4
BLOCKING ACTIVITY OF SELECTED ANTI-
IL-36 YEAST CLONE FAB SUPERNATANTS
IN HEK BLUE CELL-BASED ASSAY

| Yeast Fab | % Inhibition | | |
|---|---|---|---|
| supernatant | hu-IL-36a | hu-IL-36b | hu-IL-36g |
| mAb1.0 | 70 | N.D. | 31 |
| mAb2.0 | 91 | N.D. | 89 |
| mAb3.0 | 40 | N.D. | 64 |
| mAb4.0 | 91 | N.D. | 57 |
| mAb5.0 | 75 | N.D. | 75 |
| mAb6.0 | N.D. | 86 | N.D. |
| mAb7.0 | N.D. | 84 | N.D. |
| mAb8.0 | N.D. | 85 | N.D. |

[0303] Based on their observed binding and blocking activities summarized in Tables 3 and 4, five of the IL-36α/IL-36γ-crossreactive antibodies (mAb1.0-mAb5.0) and three of the IL-36β-reactive antibodies (mAb6.0-mAb8.0) were produced as recombinant human IgG1 and cleaved Fab fragments for further characterization. IgGs were produced by transient co-transfection of mammalian expression plasmids encoding their heavy and light chains in Expi293 or ExpiCHO cells (Thermo Fisher Scientific) according to the manufacturer's instructions. Cells were harvested after 5-7 days and the clarified supernatant was applied to MabSelect SuRe columns (GE Healthcare, Chicago, Ill., USA) equilibrated in TBS. Protein was eluted in 20 mM citrate pH 2.95, 150 mM NaCl (CBS) and immediately neutralized with 1/25 volume 1.5 M Tris-HCl pH 8.8. Fab fragments and were produced by lysyl-C (Wako Chemicals) cleavage. Briefly, Lysyl-C cleavage was carried out in PBS containing 100 mM Tris pH 8.0 at 37° C. for 1 hour with gentle agitation, and stopped by diluting the reaction 10-fold into 50 mM sodium acetate pH 5.2. The Fab fraction was purified by applying the sample to an SP-HP cation exchange column (GE Healthcare, Chicago, Ill., USA) equilibrated in 10 mM sodium acetate pH 5.2 and eluting with a 30 column volume gradient to 100% 10 mM sodium acetate pH 5.2, 1 M NaCl. Fractions containing Fab were pooled, concentrated and buffer-exchanged into PBS.

### D. Binding Kinetics Analysis of Selected Anti-IL-36 Antibodies

[0304] Surface plasmon resonance (SPR) analysis was used to determine binding affinity for hu-IL-36α and hu-IL-36γ of the purified mAb2.0 Fab; and for hu-IL-36β of the purified mAb6.0 Fab using a BIACORE™ 8K instrument (GE Healthcare, Chicago, Ill., USA). Briefly, a 1:4 dilution of Biotin CAPture Reagent (GE Healthcare, Chicago, Ill., USA)) into HBS-EP buffer (GE Healthcare, Chicago, Ill., USA; 0.01 M HEPES pH 7.4, 0.15 M NaCl, 3 mM EDTA, 0.005% Surfactant P20) was applied to a CAP sensor chip at 2 μL/min flow rate. For kinetics measurements, 12.5 nM biotinylated hu-IL-36α and hu-IL-36γ; 6 nM biotinylated hu-IL-36β was captured at 10 μL/min to achieve 25-40 response units in the second flow cell (FC2). FC1 was kept as a reference. Next, 2-fold serial dilutions of the Fab protein in HBS-P buffer (GE Healthcare, Chicago, Ill., USA; 0.01 M HEPES pH 7.4, 0.15 M NaCl, 0.005% surfactant P20) from low (0.78 nM of mAb2.0 Fab, 1.56 nM of mAb6.0 Fab) to high (100 nM of mAb2.0 Fab, 200 nM of mAb6.0 Fab) were injected (flow rate: 30 μL/min) at either 25° C. or 37° C. The sensorgram was recorded and subject to reference and buffer subtraction before data analysis with the BIACORE® 8K Evaluation Software (GE Healthcare, Chicago, Ill., USA; version 1.1.1.7442). Association rates (kₒₙ) and dissociation rates (k_{off}) were calculated using a simple one-to-one Langmuir binding model. The equilibrium dissociation constant (K_{D}) was calculated as the ratio of k_{off}/kₒₙ.

[0305] The Biacore affinity results for mAb2.0 Fab and mAb6.0 Fab are summarized below in Table 5.

TABLE 5
BINDING AFFINITY OF SELECTED ANTI-IL-36 ANTIBODIES AT 25° C.
AND 37° C. (K_{D}, k_{ON}, k_{OFF})

| 1:1 binding fit | | | | | | | |
|---|---|---|---|---|---|---|---|
| | Biotinylated | K_{D} (nM) | | kₒₙ (1/Ms) | | k_{off} (1/s) | |
| Fab | hu-IL-36 | 25° C. | 37° C. | 25° C. | 37° C. | 25° C. | 37° C. |
| mAb2.0 | hu-IL-36α | 1.2 | 0.3 | 3.45 × 10⁵ | 1.69 × 10⁶ | 4.13 × 10⁻⁴ | 5.02 × 10⁻⁴ |
| mAb6.0 | hu-IL-36β | 1.79 | 1.93 | 4.04 × 10⁴ | 6.11 × 10⁴ | 7.23 × 10⁻⁵ | 1.18 × 10⁻⁴ |
| mAb2.0 | hu-IL-36γ | 0.98 | 1.61 | 3.66 × 10⁵ | 6.71 × 10⁵ | 3.58 × 10⁻⁴ | 1.08 × 10⁻³ |

### E. Functional Activity of Recombinant Anti-IL-36 Antibodies in Cell-Based Assays

### Hu-IL-36-Blocking Activity of Antibodies in HEK Blue Reporter Assay

[0306] The recombinant anti-hu-IL-36 antibodies derived from the eight parental yeast clones, mAb1.0-mAb8.0, were tested to determine their abilities to block hu-IL-36α, hu-IL-36β and hu-IL-36γ mediated activation of the IL1RL2/IL1RAP pathways using the HEK-Blue IL-1/IL-33 sensor cells transiently transfected with the IL-36 receptor, IL1RL2.

[0307] HEK-Blue SEAP assays using recombinant anti-hu-IL-36 antibodies were performed similarly to the assay described above with yeast cell culture SN. Briefly, the antibody was incubated with cells, in the absence of agonist within the standard growth medium, for one hour at 37° C. with 5% CO₂. Following the one-hour incubation, the desired agonist, at the estimated EC₅₀ concentration, was added to a final volume 200 μL and the experiment was allowed to proceed for an additional 24 hours. The negative control (NC), represents cells exposed to growth medium only, while the positive control (PC) represents cells exposed to the agonist only (in the absence of antagonistic or control antibodies).

[0308] To determine the half maximal inhibitory concentration (IC₅₀) of the antibodies (including Fabs as described in the following Examples), a seven-point serial dilution series was used (starting at the concentration indicated). As with the agonist dose response curves described herein, non-linear regression analysis was performed using GraphPad Prism 7 software to determine the IC₅₀ value from the assay results.

[0309] Hu-IL-36α (SEQ ID NO: 1), hu-IL-36β (SEQ ID NO: 2), and hu-IL-36γ (SEQ ID NO: 3), were used as agonists in the following HEK-Blue assays. Dose responses were carried out for all of the mAbs. Results of these HEK Blue assays are shown below in Table 6.

TABLE 6
IL-36 INHIBITION IN HEK BLUE ASSAY OF
RECOMBINANT ANTI-HU-IL-36 ANTIBODIES

| | IC₅₀ (nM) | | |
|---|---|---|---|
| Antibody | hu-IL-36α | hu-IL-36β | hu-IL-36γ |
| mAb1.0 | 43 | N.D. | 5.3 |
| mAb2.0 | 5.7 | N.D. | 7.5 |
| mAb3.0 | 90 | N.D. | 30 |
| mAb4.0 | 16 | N.D. | 52 |
| mAb5.0 | 95 | N.D. | 142 |
| mAb6.0 | N.D. | 0.64 | N.D. |
| mAb7.0 | N.D. | 1.4 | N.D. |
| mAb8.0 | N.D. | 0.34 | N.D. |

N.D. = no blocking activity detected

[0310] As shown by the HEK Blue assay results of Table 6, of all antibodies tested mAb2.0 demonstrated the most potent blocking activity for both hu-IL-36α and hu-IL-36γ, whereas mAb6.0 demonstrated potent blocking activity for hu-IL-363.

### Cy-IL-36-Blocking Activity of Antibodies in HEK Blue Reporter Assay

[0311] The recombinant anti-hu-IL-36 antibodies mAb2.0 and mAb6.0 were tested to determine their abilities to block cynomolgus monkey IL-36 (cy-IL-36α, cy-IL-36β and cy-IL-36γ)-mediated activation of the IL1RL2/IL1RAP pathways using the HEK-Blue IL-1/IL-33 sensor cells transiently transfected with the human IL-36 receptor IL1RL2. HEK-Blue SEAP assays performed using cynomolgus monkey IL-36 were performed similarly to the assay described above with human IL-36 cytokines. Cy-IL-36α, cy-IL-36β, and cy-IL-36γ, were used as agonists in this HEK-Blue assay. Agonist dose-response curves, consisting of a twelve-point serial dilution series, were generated to demonstrate potent signaling of the cy-IL-36 cytokines through the human IL1RL2/IL1RAP pathways, and to provide an estimate of the half maximal effective concentration (EC₅₀) of agonist to be used in the assay. To determine the half maximal inhibitory concentration (IC₅₀) of the antibodies an eleven-point serial dilution series was used. As with the agonist dose response curves mentioned previously, non-linear regression analysis was performed using GraphPad Prism 7 software to determine the IC₅₀ value from the assay results. Dose responses were carried out for all of the mAbs. mAb2.0 demonstrated potent blocking activity for cy-IL-36α and cy-IL-36γ (IC₅₀ 0.56 nM and 1.71 nM, respectively), whereas mAb6.0 demonstrated potent blocking activity for cy-IL-36β (IC₅₀ 1.96 nM).

### Blocking Activity of Anti-Hu-IL-36 Antibodies in IL-36-Stimulated IL-8 Secretion by HaCat Cells

[0312] The human keratinocyte cell line HaCat is derived from in vitro spontaneously transformed keratinocytes from histologically normal skin. The HaCat cell line is commercially available and was obtained from AddexBio (catalog #T002000). The cryopreserved cells were thawed and maintained using the general guidelines recommended by the manufacturer. HaCat cells were maintained in a growth medium consisting of DMEM with L-Glutamine, 4.5 g/L Glucose and Sodium Pyruvate (Corning), supplemented with 10% fetal bovine serum (Atlanta Biologicals) that was heat-inactivated prior to use (56° C. for 30 minutes), 100 IU/mL penicillin and 100 μg/mL streptomycin, 1 mM sodium pyruvate (Corning). The day prior to experimental use, HaCat cells were seeded on flat-bottom, 96-well plates at 10,000 cells/well to be at ˜80-85% confluency the day of use.

[0313] Prior to use in antibody blocking assays, the agonist EC₅₀ was determined by performing an agonist dose-response curve in a similar manner as described in Example 2 for the HEK Blue cells but with the following modifications. Following addition of the agonist to HaCat cells in wells containing HaCat cell growth medium only (final volume 200 μL), the cells were returned to the tissue culture incubator (37° C. with 5% CO₂) for 24 hours. Tissue culture supernatant was then collected and stored at −20° C.

[0314] The antibody blocking assays were performed as above for HEK Blue cells but in a manner conducive to obtaining IC₅₀ values, with modifications to specifically account for HaCat cell usage. Briefly, the anti-hu-IL-36 IgG antibody, the natural IL-36 antagonist IL-36Ra, or an appropriate antibody control (e.g., Hu IgG1 Ctrl), was incubated with HaCat cells for 1 hour at 37° C., followed by the addition of agonist (IL-36α, IL-36β, or IL-36γ). The experiment was allowed to proceed for an additional 24 hours (37° C. with 5% CO₂), with cell culture supernatants collected and quantification of IL-8 performed as described below.

[0315] A human IL-8 ELISA kit (Thermo Fisher Scientific) was used to quantify the level of IL-8 within the supernatant according to the manufacturer guidelines. The raw data obtained was analyzed using GraphPad Prism software, with interpolations performed using linear regression analysis. Interpolated data was then analyzed using non-linear regression 3 parameter analysis to derive agonist EC₅₀ and antibody IC₅₀ values.

[0316] As shown by the results in FIG. 1A and FIG. 1C, mAb2.0 demonstrated potent blocking activity for hu-IL-36α and hu-IL-36γ (IC₅₀ 0.28 nM and 1.23 nM, respectively), whereas as shown in FIG. 1B, mAb6.0 demonstrated potent blocking activity for hu-IL-36β (IC₅₀ 0.082 nM) in the HaCat human keratinocyte cell line. The blocking potency of mAb2.0 for hu-IL-36α and hu-IL-36γ was superior to that of the natural antagonist IL-36Ra (100-fold and 12-fold, respectively), and the blocking potency of mAb6.0 for hu-IL-36β was superior to that of IL-36Ra (1000-fold).

### Activity of Anti-IL-36 Antibodies in Blocking IL-36-Stimulated IL-8 Secretion by Primary Human Keratinocytes

[0317] Primary human neonatal pooled keratinocytes (HEKn) are commercially available and were obtained from ThermoFisher (catalog #A13401). Cells were isolated from normal (disease free) donated human tissue and cryopreserved by the manufacturer. The cells were thawed and maintained using the general guidelines recommended by the manufacturer. HEKn cells were maintained in a growth medium consisting of EpiLife Medium (ThermoFisher) with Human Keratinocyte Growth Supplement (ThermoFisher), 100 IU/mL penicillin and 100 μg/mL streptomycin. The day prior to experimental use, HEKn cells were seeded on flat-bottom, 96-well plates at 10,000 cells/well to be at ˜80-85% confluency the day of use.

[0318] Prior to use in antibody blocking assays, the agonist EC₅₀ was determined by performing an agonist dose-response curve in a similar manner as described in Example 2 for the HaCat cells but with the following modifications. Following addition of the agonist to HEKn cells in wells containing cell growth medium only (final volume 200 μL), the cells were returned to the tissue culture incubator (37° C. with 5% CO₂) for 24 hours. Tissue culture supernatant was then collected and stored at −20° C.

[0319] The antibody blocking assays were performed as above for HaCat cells. Briefly, xIL-36 IgG, or an appropriate antibody control (e.g., Hu IgG1 Ctrl), was incubated with HEKn cells, as indicated, for 1 hour at 37° C., followed by the addition of agonist (IL-36α, IL-36β, or IL-36γ). The experiment was allowed to proceed for an additional 24 hours (37° C. with 5% CO₂), with cell culture supernatants collected and quantification of IL-8 performed as described below.

[0320] A human IL-8 ELISA kit (Thermo Fisher Scientific) was used to quantify the level of IL-8 within the supernatant according to the manufacturer guidelines. The raw data obtained was analyzed using GraphPad Prism software, with interpolations performed using linear regression analysis. Interpolated data was then analyzed using standard non-linear regression 3 parameter analysis to derive agonist EC₅₀ and antibody IC₅₀ values.

[0321] As shown by the HEKn assay results in FIG. 2A and FIG. 2C, mAb2.0 demonstrated potent blocking activity for hu-IL-36α and hu-IL-36γ (IC₅₀ 0.33 nM and 2.27 nM, respectively), whereas as shown in FIG. 2B, mAb6.0 demonstrated potent blocking activity for hu-IL-36β (IC₅₀ 1.75 nM) in primary human adult keratinocytes.

### Example 3: Activity of mAb6.0 HC/mAb2.0 LC Chimera mAb6.0_2.0 in Binding and Blocking Hu-IL-36P

[0322] mAb6.0_2.0 was generated similar to other IgGs described in Example 2 above, except by co-transfecting the heavy chain of mAb6.0 and the light chain of mAb2.0.

[0323] Surface plasmon resonance (SPR) analysis was used to determine binding affinity for hu-IL-36β of mAb6.0_2.0 IgG using a BIACORE™ 8K instrument (GE Healthcare, Chicago, Ill., USA). Briefly, 6 nM mAb6.0_2.0 IgG or mAb6.0 IgG in HBS-P buffer (GE Healthcare, Chicago, Ill., USA; 0.01 M HEPES pH 7.4, 0.15 M NaCl, 0.005% surfactant P20) was captured on a protein A sensor chip (GE Healthcare, Chicago, Ill., USA) a 10 μL/min to achieve 50-60 response units in the second flow cell (FC2). FC1 was kept as a reference. Next, 3-fold serial dilutions of hu-IL-36β in HBS-P buffer from low (0.046 nM of hu-IL-36β) to high (100 nM of hu-IL-36β) were injected (flow rate: 30 μL/min) at either 37° C. The sensorgram was recorded and subject to reference and buffer subtraction before data analysis with the BIACORE® 8K Evaluation Software (GE Healthcare, Chicago, Ill., USA; version 1.1.1.7442). Association rates (kₒₙ) and dissociation rates (k_{off}) were calculated using a simple one-to-one Langmuir binding model. The equilibrium dissociation constant (K_{D}) was calculated as the ratio of k_{off}/kₒₙ.

[0324] mAb6.0_2.0 IgG bound hu-IL-36β with a K_{D} of 6.7 nM (kₒₙ=3.20×10⁵ l/Ms, k_{off}=2.14×10⁻³ l/s) while mAb6.0 IgG bound hu-IL-36β with a K_{D} of 0.42 nM (kₒₙ=3.62×10⁵ l/Ms, k_{off}=1.15×10⁻⁴ l/s). Thus mAb6.0_2.0 bound hu-IL-36β with a 16-fold lower affinity than mAb6.0.

[0325] To determine the blocking potency and efficacy of mAb6.0_2.0 IgG in vitro, we evaluated its ability to inhibit hu-IL-36β-stimulated IL-8 secretion by HaCat cells. HaCat cell assays were performed as described in Example 2. Briefly, mAb6.0_2.0 IgG, mAb6.0 IgG, or an appropriate antibody control (e.g., Hu IgG1 Ctrl), was incubated with HaCat cells for 1 hour at 37° C., followed by the addition of hu-IL-36β agonist. The experiment was allowed to proceed for an additional 24 hours (37° C. with 5% CO₂), with cell culture supernatants collected and quantification of IL-8 performed as described in Example 2. Interpolated data was then analyzed using standard non-linear regression analysis in GraphPad Prism software to derive antibody IC₅₀ values.

[0326] mAb6.0_2.0 IgG was found to inhibit hu-IL-36β-stimulated IL-8 secretion by HaCat keratinocyte cell line with a 16-fold lower potency than mAb6.0 IgG (mAb6.0_2.0 IC₅₀=12.7 nM; mAb6.0 IC₅₀=0.8 nM).

### Example 4: Affinity Maturation of Anti-IL-36 Antibodies Using Phage Library Panning

[0327] This example illustrates the preparation of affinity matured versions of the mAb6.0_2.0 and mAb2.0 antibodies with improved affinities for IL-36β and IL-36α/γ.

### A. Mutation to Prevent Pyroglutamate Conversion

[0328] To prevent the formation of pyroglutamate variants, glutamine (Q or Gln) may be mutated to glutamate (E or Glu) (Amphlett, G. et al., Pharm. Biotechnol., 9:1-140 (1996)). Position 1 (according to Kabat numbering) in the heavy chain variable domains and light chain variable domains of mAb2.0 and mAb6.0 was mutated from glutamine (Q) to glutamate (E) by gene synthesis, resulting in antibodies mAb2, mAb6 and mAb6_2. The variable domains were cloned into a mammalian Fab expression construct containing an 8×His tag to generate Fab proteins. Similar mutations at position 1 may also be made in mAb1.0, mAb3.0, mAb4.0, mAb5.0, mAb7.0 and mAb8.0.

B. mAb6_2 Affinity Maturation NNK Library Construction and Panning

[0329] To improve the affinity of mAb6 heavy chain paired with mAb2 light chain (mAb6_2, one arm for common light chain bispecific molecule) against human IL-36β, phage libraries were constructed from mAb6_2 in Fab-amber format for monovalent Fab phage display with heavy chain HVR residues (i.e., HVR-H1, HVR-H2, and HVR-H3) randomized using the NNK degenerate codon that encodes for all 20 amino acids with 32 codons (Brenner et al., 1992) (with mAb2 light chain residues kept unchanged). Libraries were designed to allow one NNK mutation in each of the three heavy chain HVRs. Synthesized mutagenesis oligonucleotides were then used to construct heavy chain libraries using Kunkel mutagenesis (Kunkel et al., 1987). The resultant library DNA was electroporated into E. coli XL1 cells, yielding approximately 4×10⁹ transformants. Phage libraries were incubated in SUPERBLOCK™ PBS buffer (Pierce) and 0.05% TWEEN® 20 for 30 min and then applied on human IL-36β coated plate for first round panning. In the subsequent two to three rounds, phage libraries were incubated with decreasing concentration of biotinylated human IL-36β with 1000× non-biotinylated human IL-36β as competitor in solution to increase the selection stringency.

C. Characterization of mAb6_2 Phage Variants from Affinity Maturation NNK Library

[0330] Selected phages with top binding signal were purified to perform phage competition ELISA. The optimal phage concentration was incubated with serially-diluted human IL-36β in ELISA buffer (0.5% BSA and 0.05% TWEEN©20 in PBS) in NUNC F plate for two hours. 80 μl of the mixture was transferred to human IL-36β coated wells for 15 min to capture unbound phage. The plate was washed with wash buffer (0.05% TWEEN©20 in PBS), and HRP-conjugated anti-M13 antibody (Sino biological, Cat #11973-MM05-H-50) was added in ELISA buffer for 30 min. The plate was incubated at room temperature for one hour with agitation, washed six times with wash buffer and developed for 15 minutes by addition of 100 μL/well of 1 Step Turbo™ B substrate (ThermoFisher, Cat #34022). The enzymatic reaction was stopped using 50 μL/well of 2N H₂SO₄. Plates were analyzed using a Perkin Elmer plate reader (Envision 2103 multilabel reader) at 450 nm. The absorbance at 450 nm was plotted as a function of antigen concentration in solution to determine phage IC₅₀. This was used as an affinity estimate for the Fab clone displayed on the surface of the phage. Real affinities for purified Fab molecules for the phage variants were also measured using Biacore (method described in detail in section E below). Variant HVR sequences, phage IC₅₀ summary and K_{D} values are shown below in Table 7.

TABLE 7
MAB6_2 VARIANT HVR SEQUENCES, IC₅₀ AND
K_{D} VALUES AGAINST HU-IL-36B

| | | | | | Biacore |
|---|---|---|---|---|---|
| | HVR-H1 | HVR-H2 | HVR-H3 | IC₅₀ | K_{D} |
| Variant | (30-35A) | (50-61) | (93-102) | (nM) | (nM) |
| mAb6_2 | TSSNYYW | SIDYTGS | ARGKYYET | 8.57 | 40.1 |
| | | TYYNP | YLGFDV | | |
| mAb6_2.1 | TSTNYYW | NIDYTGS | ATGKYYET | 0.77 | 3.50 |
| | | TYYNA | YLGFDV | | |
| mAb6_2.2 | TSSNAYW | SIDYTGS | AHGKYYET | 1.04 | 2.55 |
| | | TAYNP | YLGFDV | | |
| mAb6_2.3 | TASNYYW | SIDYTGS | ATGKYYET | 0.49 | 1.62 |
| | | TYYNT | YLGFDV | | |
| mAb6_2.4 | TASNYYW | SIDYTGS | ATGKYYET | ND | 1.05 |
| | | TYYNP | YLGFDV | | |

D. Next Generation Sequencing of mAb6_2 Affinity Maturation Libraries

[0331] In order to further improve the affinity of mAb6_2, next-generation sequencing (NGS) of mAb6_2 affinity maturation libraries was performed. Phagemid double-stranded DNA was isolated from E. coli XL-1 cells carrying phagemids from the initial phage library (unsorted libraries) and from the second and third rounds of solution selection (sorted libraries). Purified DNA was used as the template to generate amplicons of V_{H} regions using the Illumina 16s library preparation protocol. Sequencing adapters and dual-index barcodes were added using the Illumina Nextera XT Index Kit. In preparation for sequencing on an Illumina MiSeq instrument (Illumina, San Diego, USA), adapter-ligated amplicons were subjected to standard Illumina library denaturing and sample loading protocol using MiSeq Reagent Kit v3 (600 cycles). Paired-end sequencing was performed to cover the entire length of the amplicon with insert size of 200 bp to 300 bp.

[0332] Paired-end sequencing data were first assembled using paired-end assembler PANDAseq (Masella et al., 2012) to obtain complete amplicons. Quality control (QC) was then performed on identified amplicons, where each amplicon was checked for the absence of sequence insertions or deletions and stop codons, and each CDR sequence was allowed to carry only up to one NNK mutation and no non-NNK mutations. Position weight matrices were generated by calculating the frequency of all mutations of every randomized position. Enrichment ratios for each mutation were calculated by dividing the frequency of a given mutation at a given position in the sorted sample with the frequency of the very same mutation in the unsorted sample, as described previously (Koenig et al., 2015). Predicted mutations in their HVRs that supported improved binding of mAb6_2 to hu-IL-36β are summarized in Table 8 below.

TABLE 8
PREDICTED MUTATIONS IN MAB6_2 SUPPORTING
HU-IL-36β BINDING

| Domain | Position | Substitutions with Improved Binding |
|---|---|---|
| HVR-H1¹ | T30 | D, E, N |
| | S31 | A, E, G, K, Q, R, T |
| | S32 | A, D, E, G, N, P, Q, T |
| | Y34 | A, E, G, H, M, N, Q, S, T, V |
| | W35A | F, I, V, Y |
| HVR-H2² | S50 | N, T |
| | I51 | M, V |
| | Y53 | H |
| | T54 | H, L, N |
| | G55 | A, D, E, H, K, N, Q, R, S, T |
| | S56 | A, D, Q, T |
| | T57 | A, D, E |
| | Y58 | A, F, Q, S, W |
| | N60 | D, E, H, P, Q |
| | P61 | A, E |
| HVR-H3³ | R94 | A, E, G, H, M, N, Q, S, T, Y |
| | K96 | A, S |
| | E99 | T |

¹HVR-H1 from positions 30-35A
²HVR-H2 from positions 50-61
³HVR-H3 from positions 93-102

E. Characterization of mAb6_2 Affinity-Improved NGS Variants
Generation of mAb6_2 Affinity-Improved NGS Fab Variants

[0333] According to predicted mutations from NGS analysis (shown in Table 8 above), selected mAb6_2 NGS Fabs with variant HVR sequences (shown below in Table 9) were synthesized for cloning into a mammalian Fab expression construct containing an 8×His tag to generate Fab proteins. Plasmids encoding the heavy or light chain were transiently transfected into Expi293F cells (Thermo Fisher) according to the manufacturer's protocol using a 1:1 ratio of HC:LC. Fabs were purified with a HisPur Ni-NTA column by diluting supernatant 1.5× with 1× phosphate-buffered saline pH 7.2 (PBS), adding 10 mM imidazole, and binding to resin in batch mode for 2 hours. Resin was flowed over a column and washed with 20 CV PBS+20 mM imidazole and eluted with 5 CV PBS+250 mM imidazole. Samples were buffer exchanged to PBS using a PD10 column (GE).

Affinity Determination of mAb6_2 Affinity-Improved NGS Fab Variants Using SPR

[0334] To determine the binding affinity of recombinant mAb6_2 NGS Fab variants to human IL-36β at 37° C., SPR measurements with a BIACORE™ 8K instrument were performed. Briefly, a 1:4 dilution of Biotin CAPture Reagent (GE) into HBS-EP buffer (0.01 M HEPES pH 7.4, 0.15 M NaCl, 3 mM EDTA, 0.005% Surfactant P20) was applied to a CAP sensor chip at 2 uL/min flow rate. For kinetics measurements, 6 nM biotinylated human IL-36β was captured at 10 uL/min to achieve ˜50 response units in the second flow cell (FC2). FC1 was kept as a reference. Next, 3-fold serial dilutions of Fab in HBS-P buffer (0.01M HEPES pH 7.4, 0.15M NaCl, 0.005% surfactant P20) from low (3.125 nM) to high (200 nM) were injected (flow rate: 10 uL/min) at 37° C. The sensorgram was recorded and subject to reference and buffer subtraction before evaluating by BIACORE® 8K Evaluation Software (version 1.1.1.7442). Association rates (kₒₙ) and dissociation rates (k_{off}) were calculated using a simple one-to-one Langmuir binding model. The equilibrium dissociation constant (K_{D}) was calculated as the ratio of k_{off}/kₒₙ summarized in Table 9.

TABLE 9
MAB6_2 VARIANT HVR SEQUENCES, THEIR kₒₙ, k_{off} AND
K_{D} VALUES AGAINST hu-IL-36β

| Fab | HVR-H1 | HVR-H2 | HVR-H3 | kₒₙ | k_{off} | K_{D} |
|---|---|---|---|---|---|---|
| Identifier | (30-35A) | (50-61) | (93-102) | (1/Ms) | (1/s) | (nM) |
| mAb6_2 | TSSNY | SIDYTGSTY | ARGKYYET | 8.72 × 10⁴ | 1.28 × 10⁻³ | 14.7 |
| | YW | YNP | YLGFDV | | | |
| mAb6_2.5 | TASNY | SIDYTGSTY | ATGSYYET | 7.17 × 10⁵ | 4.76 × 10⁻⁴ | 0.66 |
| | YW | YEP | YLGFDV | | | |
| mAb6_2.6 | TASNY | SIDYTGSTY | ATGNYYET | 8.56 × 10⁵ | 7.05 × 10⁻⁴ | 0.82 |
| | YW | YEP | YLGFDV | | | |
| mAb6_2.7 | TASNT | SIDYTGSTY | ATGKYYET | 2.97 × 10⁵ | 1.80 × 10⁻⁴ | 0.61 |
| | YW | YNP | YLGFDV | | | |
| mAb6_2.8 | TASNY | SIDYTGSTY | ASGKYYET | 3.17 × 10⁵ | 3.43 × 10⁻⁴ | 1.08 |
| | YW | YNP | YLGFDV | | | |
| mAb6_2.9 | TSSNY | SIDYTGSTY | ATGKYYET | 2.99 × 10⁵ | 4.11 × 10⁻⁴ | 1.37 |
| | YW | YNP | YLGFDV | | | |
| mAb6_2.10 | TSSNY | SIDYTGSTY | ARGNYYET | 4.15 × 10⁵ | 1.03 × 10⁻³ | 2.47 |
| | YW | YQP | YLGFDV | | | |

F. mAb2 Affinity Maturation NNK Library Construction and Panning

[0335] To further improve the human IL-36α and human IL-36γ affinity of anti-IL-36 mAb2, phage libraries were constructed from mAb2 in Fab-amber format for monovalent Fab phage display with heavy chain HVR residues (i.e., HVR-H1, HVR-H2, and HVR-H3) randomized using the NNK degenerate codon that encodes for all 20 amino acids with 32 codons (Brenner et al., 1992) (with mAb2 light chain residues kept unchanged). Libraries were designed to allow one NNK mutation in each of the three heavy chain HVRs. Synthesized mutagenesis oligonucleotides were then used to construct heavy chain libraries using Kunkel mutagenesis (Kunkel et al., 1987). The resultant library DNA was electroporated into E. coli XL1 cells, yielding approximately 4×10⁹ transformants. Phage libraries were incubated in SUPERBLOCK™ PBS buffer (Pierce) and 0.05% TWEEN® 20 for 30 min and then applied on human IL-36α or human IL-36γ coated plates for first round panning. In the subsequent two to three rounds, phage libraries were incubated with decreasing concentrations of biotinylated human IL-36α or human IL-36γ with 1000× non-biotinylated human IL-36α or human IL-36γ as competitor in solution to increase the selection stringency.

G. Characterization of mAb2 Phage Variants from Affinity Maturation NNK Library

[0336] Selected phages with top binding signal were purified to perform phage competition ELISA. The optimal phage concentration was incubated with serially-diluted human IL-36α or human IL-36γ in ELISA buffer in NUNC F plate for two hours. 80 μL of the mixture was transferred to human IL-36α or human IL-36γ coated wells for 15 min to capture unbound phage. The plate was washed with wash buffer (0.05% TWEEN®20 in PBS), and HRP-conjugated anti-M13 antibody (Sino biological, Cat #11973-MM05-H-50) was added in ELISA buffer for 30 min. The plates were washed and developed as described above. The absorbance at 450 nm was plotted as a function of antigen concentration in solution to determine phage IC50. This was used as an affinity estimate for the Fab clone displayed on the surface of the phage. See Table 10 below for a summary of variant HVR sequences and phage IC₅₀.

TABLE 10
MAB2 HVR SEQUENCES AND THEIR IC50 VALUES
AGAINST hu-IL-36α and hu-IL-36γ

| | | | | Phage IC₅₀ | Phage IC₅₀ |
|---|---|---|---|---|---|
| | HVR-H1 | HVR-H2 | HVR-H3 | (nM) | (nM) |
| Variant | (30-35A) | (50-61) | (93-102) | hu-IL-36α | hu-IL-36γ |
| mAb2 | STSSYYW | SIYYTGNTYY | ARVRYGVGVPR | 1.20 | 3.20 |
| | | NP | YFDP | | |
| mAb2.1 | SDSSYYW | SIYYTGNTYY | ARVRYGVGVPR | 1.03 | 4.86 |
| | | NS | YFDP | | |
| mAb2.2 | SESSYYW | SIYYTGNTYY | AGVRYGVGVPR | 0.75 | 3.79 |
| | | NP | YFDP | | |
| mAb2.3 | STSSDYW | SIYYTGNTYY | SRVRYGVGVPR | 0.82 | 2.39 |
| | | LP | YFDP | | |
| mAb2.4 | SNSSYYW | SIYYTGNTYY | ARVRYGVGVPR | 0.68 | 1.52 |
| | | LP | YFDP | | |
| mAb2.5 | SESSYYW | SIYYTGNTYY | ARVRYGVGVPR | 0.77 | 1.88 |
| | | LP | YFDP | | |
| mAb2.6 | STSSYHW | SIYYTGNTYY | VRVRYGVGVPR | 1.62 | 1.99 |
| | | MP | YFDP | | |
| mAb2.7 | SRSSYYW | SIYYTGNTYY | TRVRYGVGVPR | 1.20 | 1.53 |
| | | WP | YFDP | | |

H. Next-Generation Sequencing of mAb2 Affinity Maturation Libraries

[0337] In order to further improve the affinity of mAb2, next-generation sequencing (NGS) of mAb2 affinity maturation libraries was performed. Phagemid double-stranded DNA was isolated from E. coli XL-1 cells carrying phagemids from the initial phage library (unsorted libraries) and from the second and third rounds of solution selection (sorted libraries). Purified DNA was used as the template to generate amplicons of V_{H} regions using Illumina 16s library preparation protocol. Sequencing adapters and dual-index barcodes were added using Illumina Nextera XT Index Kit. In preparation for sequencing on Illumina MiSeq, adapter-ligated amplicons were subjected to standard Illumina library denaturing and sample loading protocol using MiSeq Reagent Kit v3 (600 cycles). Paired-end sequencing was performed to cover the entire length of the amplicon with insert size of 200 bp to 300 bp.

[0338] Paired-end sequencing data were first assembled using paired-end assembler PANDAseq (Masella et al., 2012) to obtain complete amplicons. Quality control (QC) was then performed on identified amplicons, where each amplicon was checked for no insertion or deletion of sequences and no stop codons, each CDR sequence was allowed to carry only up to one NNK mutation and no non-NNK mutation. Position weight matrices were generated by calculating the frequency of all mutations of every randomized position. Enrichment ratios for each mutation were calculated by dividing the frequency of a given mutation at a given position in the sorted sample with the frequency of the very same mutation in the unsorted sample, as described previously (Koenig et al., 2015). The predicted mutations in the HVRs that support the binding improvement of mAb2 to hu-IL-36α or hu-IL-36γ are summarized in Table 11.

TABLE 11
PREDICTED MUTATIONS IN MAB2 SUPPORTING HUMAN
IL-36α AND IL-36γ BINDING

| Domain | Position | Substitutions with Improved Binding |
|---|---|---|
| HVR-H1¹ | S30 | D |
| | T31 | A, D, E, G, H, K, N, P, Q, R, S |
| | S32 | D, E, G, K, N, P, R |
| | S33 | G, K, N, P |
| | Y34 | A, D, E, G, H, M, N, Q, S, T, V, W |
| | Y35 | A, F, G, H, M, N, Q |
| HVR-H2² | S50 | F, I, M, Q |
| | I51 | A, G, L, R, S, T, V |
| | Y52 | A, D, E, F, G, H, K, L, M, N, P, Q, R, S, T, W |
| | Y53 | A, D, E, F, G, H, K, N, P, Q, R, S, T, W |
| | T54 | D, E, K, N, P, Q |
| | G55 | Q |
| | N56 | D, E, G, H, I, K, M, P, R, S |
| | T57 | A, E, F, G, H, K, P, Q, R, S, V, W, Y |
| | Y58 | W |
| | N60 | A, D, E, K, L, M, P, Q, S, T |
| HVR-H3³ | A93 | V |
| | R94 | A, G, N, Q, T |
| | V95 | A, F, I, K, L, M, Q, S |
| | R96 | A, I, K, L, M, P, Q, S, T, V |
| | Y97 | H, I, L, V |
| | V99 | A, F, G, K, M, N, Q, R, S, T, W, Y |
| | G100 | N, R, S, T |
| | Y100D | F, H, I, L, M, Q, R |

¹HVR-H1 from positions 30-35A
²HVR-H2 from positions 50-61
³HVR-H3 from positions 93-102

I. Characterization of mAb2 Affinity Improved NGS Variants
Generation of mAb2 affinity improved NGS Fab variants

[0339] According to predicted mutations from NGS analysis (Table 11 above) selected mAb2 NGS Fab HVR variant sequences (shown in Table 12 below) were synthesized for cloning into a mammalian Fab expression construct containing an 8×His tag to generate Fab proteins. Plasmids encoding the heavy or light chain were transfected into Expi293F cells (Thermo Fisher) using a 1:1 ratio of HC:LC. Fabs were purified with a HisPur Ni-NTA column by diluting supernatant 1.5× with 1× phosphate-buffered saline pH 7.2 (“PBS”), adding 10 mM imidazole, and binding to resin in batch mode for 2 hours. Resin was flowed over a column and washed with 20 CV PBS+20 mM imidazole and eluted with 5 CV PBS+250 mM imidazole. Samples were buffer exchanged to PBS using a PD10 column (GE).

TABLE 12
MAB2 NGS FAB VARIANT HVR SEQUENCES

| Fab | HVR-H1 | HVR-H2 | HVR-H3 |
|---|---|---|---|
| Identifier | (30-35A) | (50-61) | (93-102) |
| mAb2 | STSSYYW | SIYYTGNTYYNP | ARVRYGVGVPRYFDP |
| mAb2.8 | SDSSYYW | SIYYTGETYYAP | ARLRYGVGVPRYFDP |
| mAb2.9 | SDSSYYW | SIYYTGETYYAP | ARVKYGVGVPRYFDP |
| mAb2.10 | SDSSYYW | SIYYTGETYYAP | ARVRYGVGVPRHFDP |
| mAb2.11 | SESSYYW | SIYYTGETYYAP | ARLRYGVGVPRYFDP |
| mAb2.12 | SESSYYW | SIYYTGETYYAP | ARVKYGVGVPRYFDP |

Affinity Determination of mAb2 Affinity-Improved NGS Fab Variants Using SPR

[0340] To determine the binding affinity of recombinant mAb2 NGS Fab variants to human IL-36α and human IL-36γ at 37° C., SPR measurements with a BIACORE™ 8K instrument were performed. Briefly, a 1:4 dilution of Biotin CAPture Reagent (GE) into HBS-EP buffer (0.01 M HEPES pH 7.4, 0.15 M NaCl, 3 mM EDTA, 0.005% Surfactant P20) was applied to a CAP sensor chip at 2 uL/min flow rate. For kinetics measurements, 3 nM biotinylated human IL-36α and human IL-36γ was captured at 10 uL/min to achieve ˜50 response units in the second flow cell (FC2). FC1 was kept as a reference. Next, 3-fold serial dilutions of Fab in HBS-P buffer (0.01M HEPES pH 7.4, 0.15M NaCl, 0.005% surfactant P20) from low (3.125 nM) to high (200 nM) were injected (flow rate: 10 uL/min) at 37° C. The sensorgram was recorded and subject to reference and buffer subtraction before evaluating by BIACORE® 8K Evaluation Software (version 1.1.1.7442). Association rates (kₒₙ) and dissociation rates (k_{off}) were calculated using a simple one-to-one Langmuir binding model. The equilibrium dissociation constant (K_{D}) was calculated as the ratio of k_{off}/kₒₙ summarized in Table 13 below.

TABLE 13
MAB2 NGS FAB VARIANTS kₒₙ, k_{off} AND K_{D} AGAINST
hu-IL-36α AND hu-IL-36γ

| | hu-IL-360 | | | hu-IL-36y | | |
|---|---|---|---|---|---|---|
| Fab | kₒₙ | k_{off} | K_{D} | kₒₙ | K_{off} | K_{D} |
| Identifier | (1/Ms) | (1/s) | (nM) | (1/Ms) | (1/s) | (nM) |
| mAb2 | 1.16E+06 | 2.64E−04 | 0.23 | 1.39E+06 | 5.74E−04 | 0.41 |
| mAb2.8 | 1.83E+06 | 2.54E−04 | 0.14 | 1.80E+06 | 3.01E−04 | 0.17 |
| mAb2.9 | 2.19E+06 | 2.60E−04 | 0.12 | 2.40E+06 | 5.65E−04 | 0.24 |
| mAb2.10 | 1.49E+06 | 2.22E−04 | 0.15 | 1.37E+06 | 1.80E−04 | 0.13 |
| mAb2.11 | 1.91E+06 | 2.44E−04 | 0.13 | 1.92E+06 | 2.14E−04 | 0.11 |
| mAb2.12 | 1.70E+06 | 2.77E−04 | 0.16 | 1.81E+06 | 5.03E−04 | 0.28 |

### Example 5: In Vitro Assessment of Blocking Activity of Anti-IL-36 Antibody Variants in Hu-IL-36-Stimulated IL-8 Secretion by HaCat Cells

[0341] To determine the blocking potency and efficacy of the affinity-matured mAb2 and mAb6_2 variants in vitro, we evaluated their ability of their recombinantly produced Fab fragments to inhibit hu-IL-36-stimulated IL-8 secretion by HaCat cells. HaCat cell assays were performed as described in Example 2 except that recombinantly expressed anti-IL-36 or control antibody Fab fragments were used as antagonists in place of IgG. Briefly, anti-IL-36 Fab, or an appropriate antibody Fab control (e.g., Hu IgG1 Ctrl), was incubated with HaCat cells for 1 hour at 37° C., followed by the addition of agonist (hu-IL-36α, hu-IL-36β, or hu-IL-36γ). The experiment was allowed to proceed for an additional 24 hours (37° C. with 5% CO₂), with cell culture supernatants collected and quantification of IL-8 performed as described in Example 2. Interpolated data was then analyzed using standard non-linear regression analysis in GraphPad Prism software to derive antibody IC₅₀ values.

TABLE 14
BLOCKING ACTIVITY OF AFFINITY-MATURED ANTI-
IL-36 ANTIBODY VARIANTS IN IL-36-STIMULATED
IL-8 SECRETION BY HACAT CELLS

| | IC₅₀ (nM) | | |
|---|---|---|---|
| Recombinant mAb | IL-36α | IL-36β | IL-36γ |
| mAb2 Fab | 0.3 | N.T | 0.96 |
| mAb2.10 Fab | 0.38 | N.T | 1.09 |
| mAb2.11 Fab | 0.42 | N.T | 1.05 |
| mAb6 Fab | N.T | 0.15 | N.T |
| mAb6_2 Fab | N.T | 3.19 | N.T |
| mAb6_2.1 Fab | N.T | 1.64 | N.T |
| mAb6_2.2 Fab | N.T | 2.22 | N.T |
| mAb6_2.3 Fab | N.T | 1.31 | N.T |
| mAb6_2.4 Fab | N.T | 0.13 | N.T |
| mAb6_2.5 Fab | N.T | 0.2 | N.T |
| mAb6_2.7 Fab | N.T | 0.2 | N.T |
| mAb6_2.8 Fab | N.T | 0.33 | N.T |

[0342] As shown in Table 14, mAb2.10 Fab demonstrated the most potent blocking activity of hu-IL-36α- and hu-IL-36γ-mediated IL-8 production in HaCat cells, with an IC₅₀ of approximately 0.38 nM and 1.09 nM, respectively. As further shown in Table 14, mAb6_2.7 Fab demonstrated improved blocking activity of IL-36β-mediated IL-8 production in HaCat cells, with an IC₅₀ of approximately 0.2 nM.

### Example 6: Generation of Anti-IL-36 Multispecific Antibody mAb2.10/mAb6_2.7

[0343] mAb2.10 and mAb6_2.7 heavy chains were cloned in a “knobs-into-holes” format (Ridgway et al, 1996) into pRK expression vector in a two-step cloning process. In step 1, mAb2.10 was synthesized and cloned into a pRK vector (using AgeI and BstEII) already containing hole mutations (T366S, L368A and Y407V) and a 8×His tag. mAb6_2.7 was synthesized and cloned into a pRK vector (using AgeI and BstEII) already containing knob mutation (T366W) and a Flag tag. mAb2 light chain was also cloned in pRK expression vector with no extra mutations. After a successful initial test of expression and purification of multispecific antibody with tagged constructs, in step 2 of the cloning process, tags were removed from mAb2.10 and mAb6_2.7 heavy chains. 8×His tag from mAb2.10 was completely removed using a set of primers (Forward Primer: 5′Phos-TAAGCTTGGCCGCCATGGCC-3′ (SEQ ID NO: 514) and Reverse Primer: 5′Phos-ACCCGGAGACAGGGAGAGGC-3′ (SEQ ID NO: 515)) whereas a stop codon TAA was inserted between mAb6_2.7 heavy chain and the Flag tag using a set of primers (Forward Primer: 5′-CTGTCTCCGGGTTAAGATTACAAGG-3′ (SEQ ID NO: 516) and Reverse Primer: 5′-CCTTGTAATCTTAACCCGGAGACAG-3′ (SEQ ID NO: 517)).

[0344] The multispecific common light chain antibody mAb2.10/mAb6_2.7 was expressed in Expi293F cells (Thermo Fisher Scientific, Waltham, Mass., USA) according to the manufacturer's protocol by co-transfecting plasmids at a mass ratio of 1:1:2 encoding the heavy chain of mAb2.10 containing hole mutations and N297G (SEQ ID NO: 235), the heavy chain of mAb6_2.7 containing knob mutations and N297G (SEQ ID NO:192), and the light chain of mAb2 (SEQ ID NO: 169). Cells were harvested after 4 days and the clarified supernatant was applied to MAbSelect Sure columns (GE Healthcare, Chicago, Ill., USA) equilibrated in PBS pH 7.5. Protein was eluted with 100 mM sodium citrate pH 3 and the pH neutralized by adding 1.5 M Tris-HCl pH 8.8. Protein containing fractions were pooled and buffer-exchanged into 50 mM Tris pH 8, 10 mM NaCl. The protein was then loaded onto a Capto S Impact column (GE Healthcare, Chicago, Ill., USA) equilibrated in 50 mM Tris pH 8, 10 mM NaCl and eluted with a 30 CV gradient of 50 mM Bis-Tris pH 6.5, 10 mM NaCl.

[0345] The intact mass of the purified multispecific antibody molecule was confirmed using a Q Exactive (Thermo Scientific) mass spectrometer in combination with an Ultimate-3000 (Thermo Scientific) liquid chromatography system. Purified antibody was injected on a PLRP-S column (Agilent) that was connected to the liquid chromatography system. The intact mass spectrometry analysis verified that the observed mass matched the predicted mass of the heterodimer. The absence of homodimer species was also confirmed by using the Fabricator enzyme (Genovis) that generated a homogenous pool of F(ab′)2 and Fc/2 fragments. Each fragment matched the predicted mass.

[0346] Capto S elution fractions containing mAb2.10/mAb6_2.7, as identified by intact mass spectrometry, were pooled, and loaded onto a Superdex 200pg column (GE Healthcare, Chicago, Ill., USA). Peak fractions containing monodisperse protein were pooled and stored in 1×PBS, pH 7.5.

### Example 7: Non-Specific Binding Assessment of Anti-IL-36 Multispecific Antibody mAb2.10/mAb6_2.7

[0347] Non-specific binding of multispecific molecule mAb2.10/mAb6_2.7 IgG was assessed using baculovirus ELSA (Hotzel et al., 2012), Briefly, baculovirus particles were coated on 96-well Maxisorp plates at a 3% suspension at 4° C. overnight. The plates were then blocked in PBS with 1% BSA and 0.05% Tween-20 at room temperature for one hour. mAb2.10/mAb6_2.7 IgG at 300 nM, 100 nM, and 33 nM in 1×PBS containing 0.5% BSA and 0.05% Tween 20 (ELISA buffer) were added to the plates for 1 hour and the plate was washed with 1×PBS with 0.05% Tween 20 (wash buffer). Bound antibodies were detected with goat anti-human IgG conjugated to horseradish peroxidase (Jackson ImmunoResearch) in ELISA buffer. The plate was incubated at room temperature for one hour with agitation, washed six times with wash buffer and developed for 15 minutes by addition of 100 μL/well of 1 Step Turbo TMB substrate (ThermoFisher, Cat #34022). Enzymatic reaction was stopped using 50 μL/well of 2 N H₂SO₄. Plates were analyzed using a Perkin Elmer plate reader (Envision 2103 multilabel reader) at 450 nm and compared to reference antibodies. Compared to positive control, multispecific molecule mAb2.10/mAb6_2.7 IgG showed no detectable baculovirus ELISA signal, indicating absence of non-specific binding to baculovirus particles (Table 15).

TABLE 15
BACULOVIRUS ELISA EVALUATING NONSPECIFIC
BINDING OF MULTISPECIFIC ANTI-IL-36 ANTIBODY
MAB2.10/MAB6_2.7 IGG

| Samples | 300 nM | 100 nM | 33 nM | 0 nM |
|---|---|---|---|---|
| Negative Control | 0.047 | 0.048 | 0.056 | 0.041 |
| Medium Positive Control | 0.386 | 0.164 | 0.081 | 0.039 |
| mAb2.10/mAb6_2.7 | 0.073 | 0.053 | 0.045 | 0.040 |

### Example 8: In Vitro Assessment of Activity of Anti-Hu-IL-36 Multispecific Antibody mAb2.10/mAb6_2.7 IgG

[0348] Binding Kinetics of Anti-IL-36 Multispecific Antibody mAb2.10/mAb6_2.7

[0349] Surface plasmon resonance (SPR) analysis was used to determine the binding affinity for human and cynomolgus monkey IL-36 (“hu-IL-36” and “cy-IL-36,” respectively) using a BIACORE™ 8K instrument as described in Example 2. In-vivo biotinylated hu-IL-36α-Avi, hu-IL-36β-Avi, hu-IL-36γ-Avi, cy-IL-36α-Avi, cy-IL-36J-Avi, or cy-IL-36γ-Avi were analyzed separately for binding to mAb2.10/mAb6_2.7. Briefly, a 1:4 dilution of Biotin CAPture Reagent (GE Healthcare) into HBS-EP buffer (0.01 M HEPES pH 7.4, 0.15 M NaCl, 3 mM EDTA, 0.005% Surfactant P20) was applied to a CAP sensor chip at 2 μL/min flow rate. For kinetics measurements, 1 nM biotinylated human and cyno IL-36α-Avi, IL-36γ-Avi; 0.8 nM biotinylated human and cyno IL-36β-Avi were captured at 10 μL/min to achieve 15-25 response units in the second flow cell (FC2). FC1 was kept as a reference. Next, 2-fold serial dilutions of mAb2.10/mAb6_2.7 protein in HBS-P buffer (0.01 M HEPES pH 7.4, 0.15 M NaCl, 0.005% surfactant P20) from low (1.56 nM) to high (200 nM) were injected (flow rate: 30 μL/min) at either 25° C. or 37° C. The sensorgram was recorded and subject to reference and buffer subtraction before data analysis with the BIACORE® 8K Evaluation Software (version 1.1.1.7442). Since each multispecific IgG antibody contains only one Fab arm capable of binding to one IL-36 protein being assayed, the binding interaction is monovalent. Association rates (kₒₙ) and dissociation rates (k_{off}) were calculated using a simple one-to-one Langmuir binding model. The equilibrium dissociation constant (K_{D}) was calculated as the ratio of k_{off}/kₒₙ.

[0350] The Biacore affinity results for mAb2.10/mAb6_2.7 are summarized below in Table 16. mAb2.10/mAb6_2.7 binds to all human and cynomolgus monkey IL-36 cytokines with high and comparable affinities.

TABLE 16
AFFINITY OF MAB2.10/MAB6_2.7 MULTISPECIFIC
ANTIBODY FOR hu-IL-36 AND cy-IL-36

| | 25° C. | | | 37° C. | | |
|---|---|---|---|---|---|---|
| | kₒₙ | k_{off} | K_{D} | kₒₙ | k_{off} | K_{D} |
| Ligand | (1/Ms) | (1/s) | (nM) | (1/Ms) | (1/s) | (nM) |
| hu-IL-36α | 1.34 × 10⁵ | 1.57 × 10⁻⁴ | 1.17 | 2.23 × 10⁵ | 4.34 × 10⁻⁴ | 1.95 |
| hu-IL-36β | 7.6 × 10⁴ | 4.77 × 10⁻⁵ | 0.63 | 9.14 × 10⁴ | 1.68 × 10⁻⁴ | 1.84 |
| hu-IL-36γ | 1.71 × 10⁵ | 1.22 × 10⁻⁴ | 0.72 | 2.1 × 10⁵ | 3.41 × 10⁻⁴ | 1.63 |
| cy-IL-36α | 1.74 × 10⁵ | 3.35 × 10⁻⁴ | 1.93 | 2.43 × 10⁵ | 6.25 × 10⁻⁴ | 2.57 |
| cy-IL-36β | 6.52 × 10⁴ | 6.32 × 10⁻⁵ | 0.97 | 8.69 × 10⁴ | 2.18 × 10⁻⁴ | 2.51 |
| cy-IL-36γ | 1.65 × 10⁵ | 1.3 × 10⁻⁴ | 0.79 | 1.58 × 10⁵ | 1.48 × 10⁻⁴ | 0.94 |

Blocking Activity of Multispecific Antibody mAb2.10/mAb6_2.7 in IL-36-Stimulated IL-8 Secretion by HaCat Cells

[0351] To determine the blocking potency and efficacy of the multispecific antibody mAb2.10/mAb6_2.7, we evaluated its ability to inhibit hu-IL-36-stimulated IL-8 secretion by HaCat cells. A human IgG isotype control (“Hu IgG1 Ctrl”) was also assayed to serve as a negative control. HaCat cell assays were performed as described in Example 2 except that recombinantly expressed mAb2.10/mAb6_2.7 or Hu IgG1 Ctrl were used as antagonists. Briefly, mAb2.10/mAb6_2.7, or an appropriate antibody control (e.g., Hu IgG1 Ctrl), was incubated with HaCat cells for 1 hour at 37° C., followed by the addition of agonist (hu-IL-36α, hu-IL-36β, or hu-IL-36γ). The experiment was allowed to proceed for an additional 24 hours (37° C. with 5% CO₂), with cell culture supernatants collected.

[0352] Quantification of IL-8 in supernatants performed using Cisbio Bioassay's, HTRF technology based human IL-8 assay. The assay was performed according to manufacturer guidelines. An HTRF compatible Spectramax (Molecular Devices) was used to obtain raw data and calculate the ratio of the acceptor to donor emission signals at 665 nm and 620 nm respectively in conjunction with SoftMax Pro software (Molecular Devices). The data obtained was analyzed using GraphPad Prism software, with interpolations performed using linear regression analysis and weighting defined by “Weight by 1/Y²”. Interpolated data was then analyzed using standard non-linear regression 3 parameter analysis to derive agonist EC₅₀ and antibody IC₅₀ values.

[0353] As shown in FIG. 3A, FIG. 3B, and FIG. 3C, mAb2.10/mAb6_2.7 demonstrated potent blocking activity of IL-36α-, IL-36β- and IL-36γ-mediated IL-8 production in HaCat cells, with IC₅₀ values of approximately 0.38 nM, 0.13 nM, and 1.1 nM, respectively. At 8 nM mAb2.10/mAb6_2.7, 100% of IL-36α-, IL-36β- and IL-36γ-mediated IL-8 production in HaCat cells was inhibited.

Blocking Activity of Multispecific Antibody mAb2.10/mAb6_2.7 in IL-36-Stimulated IL-8 Secretion by Primary Human Keratinocytes

[0354] To determine the blocking potency and efficacy of the multispecific antibody mAb2.10/mAb6_2.7 on primary human cells, we evaluated its ability to inhibit hu-IL-36-stimulated IL-8 secretion by primary adult human keratinocytes. A human IgG isotype control (“Hu IgG1 Ctrl”) was also assayed to serve as a negative control. Adult normal human epidermal keratinocytes were obtained from Lonza. Cells were isolated from normal (disease free) donated human tissue and cryopreserved by the manufacturer. The cells were thawed and maintained using the general guidelines recommended by the manufacturer. HEKa cells were maintained in a growth medium consisting of supplemented keratinocyte growth media from the Gold BulletKit (Lonza). The day prior to experimental use, HEKa were seeded on flat-bottom, 96-well plates at 10,000 cells/well to be at ˜80-85% confluency the day of use. Primary keratinocyte cell assays were performed as described in Example 2 with adult human keratinocytes (HEKa), except that recombinantly expressed mAb2.10/mAb6_2.7 or Hu IgG1 Ctrl were used as antagonists. Briefly, mAb2.10/mAb6_2.7, or an appropriate antibody control (e.g., Hu IgG1 Ctrl), was incubated with HEKa cells for 1 hour at 37° C., followed by the addition of agonist (hu-IL-36α, hu-IL-36β, or hu-IL-36γ). The experiment was allowed to proceed for an additional 24 hours (37° C. with 5% CO₂), with cell culture supernatants collected and quantification of IL-8 performed using Cisbio Bioassay's, HTRF technology based human IL-8 assay as described above. Interpolated data was then analyzed using standard non-linear regression analysis in GraphPad Prism software to derive antibody IC₅₀ values.

[0355] As shown in FIG. 4A, FIG. 4B, and FIG. 4C, mAb2.10/mAb6_2.7 demonstrated potent blocking activity of IL-36α-, IL-36β- and IL-36γ-mediated IL-8 production in primary human adult keratinocytes, with IC₅₀ values of approximately 0.56 nM, 0.11 nM, and 2.7 nM, respectively. At 8 nM mAb2.10/mAb6_2.7, 100% of IL-36α-, IL-36β- and IL-36γ-mediated IL-8 production in primary human adult keratinocytes was inhibited. This example demonstrates that the potency of mAb2.10/mAb6_2.7 on primary human cells is similar to that observed on the human keratinocyte cell line HaCat.

[0356] To demonstrate the independent blocking activity of the Fab arms in the multispecific antibody mAb2.10/mAb6_2.7 we evaluated its ability to inhibit IL-8 secretion by primary adult human keratinocytes stimulated by a mixture of hu-IL-36α and hu-IL-36β using methods similar to those described above with the following modification. mAb2.10/mAb6_2.7, or an appropriate antibody control (e.g., Hu IgG1 Ctrl), was incubated with HEKa cells for 1 hour at 37° C., followed by the addition of agonists (hu-IL-36α individually, hu-IL-36β individually, or a mixture of hu-IL-36α and hu-IL-36β at approximately the EC₅₀ of each cytokine). mAb2.10/mAb6_2.7 demonstrated potent blocking activity of a mixture of IL-36α and IL-36β, with an IC₅₀ value of approximately 0.44 nM. The IC₅₀ values of mAb2.10/mAb6_2.7 against IL-36α and IL-36β individually were consistent with the blocking IC₅₀ values reported for primary human adult keratinocytes above in this example, demonstrating that the IL-36α/IL-36γ- and IL-36β-targeting Fab arms of mAb2.10/mAb6_2.7 potently and independently neutralize IL-36α, IL-36β and IL-36γ.

[0357] To determine the potency and efficacy of the multispecific antibody mAb2.10/mAb6_2.7 against a mixture of IL-36 agonist cytokines, we evaluated the ability of the antibody to block signaling by a mixture of IL-36α, IL-36β and IL-36γ on primary cells. The ability of mAb2.10/mAb6_2.7 to inhibit IL-8 secretion by primary adult human keratinocytes stimulated by mixtures of hu-IL-36α, hu-IL-36β and IL-36γ was assessed using methods similar to those described above with the following modifications. mAb2.10/mAb6_2.7, or an appropriate antibody control (e.g., Hu IgG1 Ctrl), was incubated with HEKa cells for 1 hour at 37° C., followed by the addition of a mixture of agonists (hu-IL-36α, hu-IL-36β, and hu-IL-36γ at approximately the EC₅₀-EC₆₅ of each cytokine). The IC₅₀ value of mAb2.10/mAb6_2.7 was determined to be 1.16 nM by titrating it in the presence of the described cytokine mixture, demonstrating potent blocking activity in mixtures containing IL-36α, IL-36β, and IL-36γ.

### Example 9 DSC Stability Assessment

[0358] In order to study the influence of heavy chain modifications on antibody stability DSC (Differential Scanning Calorimetry) performed with antibodies differing only in the modifications present in the heavy chains of the antibody. The aim was to compare the relative stability of the N297 mutation with and without YTE and also the impact of the LALA-YTE modification. The antibodies compared differed in the modifications present as indicated below:

[0359] i. PUR3685; LALA-YTE;

[0360] ii. LAS39328 (PUR3677) N297G;

[0361] iii. LAS39329 (PUR3678) N297G+YTE;

[0362] iv. E-N297G-LS-KiH (exemplary Ab #27 from Table 2D);

[0363] v. E-LALA-YTE-KiH (exemplary Ab #23 from Table 2D);

[0364] vi. E-LALA-YTE-S-S-KiH (exemplary Ab #21 from Table 2D); and

[0365] vii. E-LALA-YTE-S-S inverse KiH (exemplary Ab #22 from Table 2D).

TABLE 17
PARAMETERS AND CONDITIONS USED TO
ASSESS ANTIBODY STABILITY BY DSC

| Parameter/condition | Method 1 | Method 2 |
|---|---|---|
| Antibody | PUR3685; LALA-YTE | E-N297G-LS-KiH |
| modifications | LAS39328 (PUR3677) | E-LALA-YTE-KiH |
| | N297G | E-LALA-YTE- S-S-KiH |
| | LAS39329 (PUR3678) | E-LALA-YTE- S-S |
| | N297G + YTE | inverse KiH. |
| Final buffer | 2 × PBS | PBS |
| Sample | 0.5 | 1.0 |
| concentration | | |
| (mg/mL) | | |
| Starting | 25 | 10 |
| Temperature (° C.) | | |
| Final Temperature | 100 | 95 |
| (° C.) | | |
| Scan Rate (° C./hr) | 60 | 90 |
| Data analysis | Origin 7.0 | MicroCai |
| software | | PEAQ DSC |

[0366] Antibodies having the following modifications were analyzed using the parameters/conditions listed under Method 1 in Table 17: (PUR3685) LALA-YTE, LAS39328 (PUR3677) N297G and LAS39329 (PUR3678) N297G+YTE. The results obtained are shown in FIG. 7A and Table 18. As can be seen, the presence of the N297G+YTE modifications resulted in quite lower Tm onset compared to the LALA modification.

[0367] Antibodies having the following modifications were analysed using the parameters/conditions listed under Method 2 in Table 17: E-N297G-LS-KiH, E-LALA-YTE-KiH, E-LALA-YTE-S-S-KiH and E-LALA-YTE-S-S inverse KiH. The results obtained are shown in FIG. 7B and Table 18. In particular, the presence of a disulfide bond, S-S, was shown to further increase the stability compared to the LALA modification without S-S.

TABLE 18

| | DSC | Tₘ (° C.) | | | Tₘ onset |
|---|---|---|---|---|---|
| Antibody | method | Tₘ1 | Tₘ2 | Tₘ3 | (° C.) |
| E-LALA-YTE-KiH | 1 | 64.51 | 72.67 | 80.57 | 56.49 |
| E-N297G-KiH | 1 | 63.79 | 71.41 | 80.25 | 55.10 |
| E-N297G-YTE-KiH | 1 | 55.41 | 72.66 | 80.29 | 46.59 |
| E-N297G-LS-KiH | 2 | 66.1 | 80.9 | — | 58.6 |
| E-LALA-YTE-KiH | 2 | 65.9 | 73.3 | 81.6 | 59.3 |
| E-LALA-YTE- S-S- | 2 | 65.7 | 81.7 | — | 59.7 |
| KiH | | | | | |
| E-LALA-YTE- S-S | 2 | 65.6 | 81.7 | — | 59.3 |
| inverse KiH | | | | | |

[0368] The improved thermal stability shown by DSC further supports the suitability of the claimed antibodies for clinical development and manufacturing.

### Example 10: Characterization of Four Advanced Leads

[0369] In order to further assess the antibodies of the invention, stressed stability studies of low and high concentration antibody in a non-optimized formulation was performed. The stressed stability studies were performed on the antibodies indicated in the table below (i.e., E-N297G-LS-KiH, E-LALA-YTE-KiH, E-LALA-YTE-S-S-KiH, and E-LALA-YTE-S-S inverse KiH). These antibodies correspond to exemplary antibodies 27, 23, 21 and 22 in Table 21D. The non-optimized formulation contained 20 mM histidine buffer and 5% sucrose and had a pH of 6.0.

[0370] In the low concentration stability study the ‘reference’ samples were stored at 2-8° C. and the ‘stressed’ samples were stored at 25° C. and 40° C. The samples were analysed at the start of the experiment (t=0) and after two weeks (t=2w) and four weeks (t=4w) storage.

[0371] For the high concentration stability study the ‘reference’ samples were stored at 2-8° C. and the ‘stressed’ samples were stored at 40° C. The samples were analysed before and after increasing the concentration and after two weeks storage (t=2w).

[0372] Aggregation of the antibody was studied by Size Exclusion Chromatography (SEC) and visual inspection (V). The results are presented in TABLE 19.

TABLE 19

| | | | | LALA_YTE_S-S |
|---|---|---|---|---|
| | N297G_LS | LALA_YTE | LALA_YTE_S-S | inverse KiH |
| Parameter | (Ex. 27) | (Ex. 23) | (Ex. 21) | (Ex. 22) |
| Purity by SEC-HPLC, % | 99.5 | 98.9 | 97.5 | 95.6 |

Stability Study Low Conc.

| | | | | |
|---|---|---|---|---|
| Concentration (by UV), | 3.2 | 5.3 | 5.0 | 4.9 |
| mg/mL | | | | |
| Aggregates by SEC at | 0.07 | 0.19 | 0.26 | 0.68 |
| t = 0, % | | | | |
| Aggregates by SEC at | 0.15 | 0.28 | 0.32 | 0.86 |
| t = 2 w at 2-8° C. % | | | | |
| Aggregates by SEC at | 0.19 | 0.30 | 0.34 | 0.91 |
| t = 4 w at 2-8° C., % | | | | |
| Aggregates by SEC at | 0.41 | 0.32 | 0.38 | 1.06 |
| t = 2 w at 25° C., % | | | | |
| Aggregates by SEC at | 0.25 | 0.36 | 0.42 | 0.97 |
| t = 4 w at 25° C., % | | | | |
| Aggregates by SEC at | 0.29 | 0.39 | 0.50 | 1.26 |
| t = 2 w at 40° C., % | | | | |
| Aggregates by SEC at | 0.34 | 0.45 | 0.59 | 1.30 |
| t = 4 w at 40° C., % | | | | |
| Visual inspection at | V, V, V | V, V, V | V, V, V | V, V, V |
| t = 0, 2 w 2-8° C., | | | | |
| and 2 w 40° C., | | | | |
| V = transparent solution | | | | |

Stability High Conc.

| | | | | |
|---|---|---|---|---|
| Original concentration | 3.2 | 5.3 | 5.0 | 4.9 |
| (by UV), mg/mL | | | | |
| Aggregation by SEC | 0.15 | 0.28 | 0.32 | 0.86 |
| before concentration, % | | | | |
| Concentration (by UV), | 54 | 103 | 83 | 122 |
| mg/mL | | | | |
| Aggregation by SEC after | 0.16 | 0.31 | 0.36 | 0.85 |
| concentration, % | | | | |
| Aggregation by SEC at | 0.52 | 0.45 | 0.56 | 1.13 |
| t = 2 w 2-8° C., % | | | | |
| Aggregation by SEC at | 0.92 | 1.06 | 1.26 | 2.31 |
| t = 2 w 40° C., % | | | | |
| Visual inspection at | V, V, V | V, V, V | V, V, V | V, V, V |
| t = 0, 2 w 2-8° C., | | | | |
| and 2 w 40° C., | | | | |
| V = transparent solution | | | | |

[0373] No visual aggregation was observed at any time point regardless of storage condition. The relative aggregation observed by SEC over time was low for all low concentration samples even under stressed conditions.

[0374] The high concentration study shows that increasing the concentration is feasible without precipitation or aggregation. Only low to moderate aggregation was observed in the concentrated samples after two weeks storage at stressed conditions.

[0375] The low propensity for aggregation in non-optimized formulations, as shown in stability even at accelerated conditions, support the suitability for clinical development and manufacturing of the claimed antibodies.

### Example 11: Binding of Anti-IL-36 Ab to Human Neonatal Fc Receptor

[0376] The binding affinity of the neonatal Fc receptor (FcRn) for IgGs is weak at physiological pH and high at endosomal acidic pH. FcRn thus binds to IgG in the endosomes, thereby facilitating their recycling back to the blood stream and avoiding degradation in the lysosomes. The YTE (M252Y/S254T/T256E) mutation was introduced in the Fc region of the anti-IL-36 antibody to increase the IgG affinity for the FcRn at pH 6 and therefore extend the antibody serum half-life.

[0377] Anti-IL-36 and Trastuzumab (a negative Control IgG1 lacking the YTE mutation) antibodies were evaluated for binding to FcRn at different pH using SPR. The results are shown in Table 20, whereby the relative binding corresponds to the affinity in Table 21.

TABLE 20

| | | | | Relative |
|---|---|---|---|---|
| Receptor | Antibody | pH | Kd (M) | Binding |
| FcRn | Trastuzumab | 6.0 | 1.79 × 10⁻⁷ | +++ |
| | | 7.4 | — | − |
| | IL-36 | 6.0 | 3.52 × 10⁻⁸ | ++++ |
| | antibody (LALA- | 7.4 | — | − |
| | YTE-S-S-KiH) | | | |

TABLE 21
RELATIVE SCALE OF BINDING

| Affinity (M) | Relative scale |
|---|---|
| 10⁻⁸ to 10⁻⁹ | ++++ |
| 10⁻⁷ | +++ |
| 10⁻⁶ | ++ |
| 10⁻⁵ | + |
| Detectable binding | +/− |
| No detectable binding | − |

[0378] As expected, both the anti-IL-36 and trastuzumab antibodies showed pH dependent binding, with significantly lower relative binding being observed at pH 7.4. However, compared to trastuzumab, the anti-IL36 antibody containing the YTE mutation showed a 5-fold increase in the binding affinity (Kd) for the FcRn at pH 6.0.

### Example 12 Binding of Anti-IL-36 Ab to Human FCT Receptors

[0379] The silencing mutation consisting of a double leucine (L) to alanine (A) substitution at the positions 234 and 235 (LALA) was introduced in the Fc region of the IL-36 antibody in order to reduce the IgG affinity to Fcγ receptors (FcγR), and therefore minimizing the risk of the Fc-mediated effector functions.

[0380] The inventors assessed the impact of the LALA mutation on the antibody binding to FcγRs by measuring the binding affinity to high affinity (type I) and low affinity (type II and III) FcγRs using SPR. The binding profile was compared to Trastuzumab, an Fc-engineered IgG with high affinity for FcγRs. The results are shown in Table 22 wherein the relative binding corresponds to the affinity shown in Table 23.

TABLE 22

| | | | | | Relative |
|---|---|---|---|---|---|
| Receptor | Antibody | Ka (1/Ms) | Kd (1/s) | Kd (M) | binding |
| FcγRI | Trastuzumab | 2.89 × 10⁵ | 9.22 × 10⁻⁵ | 3.19 × 10⁻⁹ | ++++ |
| | IL-36 antibody | — | — | — | − |
| | (LALA-YTE- | | | | |
| | S-S-KiH) | | | | |
| FcγRIIA167His | Trastuzumab | — | — | 1.51 × 10⁻⁵ | + |
| | IL-36 antibody | — | — | — | +/− |
| | (LALA- | | | | |
| | YTES-S-KiH) | | | | |
| FcγRIIA167Arg | Trastuzumab | — | — | 2.58 × 10⁻⁵ | + |
| | IL-36 antibody | — | — | — | +/− |
| | (LALA-YTE- | | | | |
| | S-S-KiH) | | | | |
| FcγRIIB | Trastuzumab | — | — | 3.1 × 10⁻⁵ | + |
| | IL-36 antibody | — | — | — | − |
| | (LALA-YTE- | | | | |
| | S-S-KiH) | | | | |
| FcγRIIIA176Val | Trastuzumab | — | — | 4.78 × 10⁻⁷ | +++ |
| | IL-36 antibody | — | — | — | +/− |
| | (LALA-YTE- | | | | |
| | S-S-KiH) | | | | |
| FcγRIIIA176Phe | Trastuzumab | — | — | 1.31 × 10⁻⁶ | ++ |
| | IL-36 antibody | — | — | — | +/− |
| | (LALA-YTE- | | | | |
| | S-S-KiH) | | | | |
| FcγRIIIB | Trastuzumab | — | — | 2.65 × 10⁻⁶ | ++ |
| | IL-36 antibody | — | — | — | − |
| | (LALA-YTE- | | | | |
| | S-S-KiU) | | | | |

TABLE 23
RELATIVE SCALE OF BINDING

| Affinity (M) | Relative scale |
|---|---|
| 10⁻⁸ to 10⁻⁹ | ++++ |
| 10⁻⁷ | +++ |
| 10⁻⁶ | ++ |
| 10⁻⁵ | + |
| Detectable binding | +/− |
| No detectable binding | − |

[0381] Trastuzumab (the positive IgG1 control) showed significant binding to high and low affinity receptors. By comparison, anti-IL36 antibody containing the LALA mutation showed no apparent binding or significantly lower binding to the high and low affinity FcγRs. Interactions between IgG and low affinity FcγRII and FcγRIII are relatively unstable and only multivalent interactions found in aggregated IgG and immune complexes will persist and lead to activation.

[0382] Notwithstanding the appended claims, the disclosure set forth herein is also defined by the following clauses, which may be beneficial alone or in combination, with one or more other causes or embodiments. Without limiting the foregoing description, certain non-limiting clauses of the disclosure numbered as below are provided, wherein each of the individually numbered clauses may be used or combined with any of the preceding or following clauses. Thus, this is intended to provide support for all such combinations and is not necessarily limited to specific combinations explicitly provided below:
[0383] <1> An anti-IL-36 antibody comprising: (i) a first light chain hypervariable region (HVR-L1), a second light chain hypervariable region (HVR-L2), and a third light chain hypervariable region (HVR-L3), and/or (ii) a first heavy chain hypervariable region (HVR-H1), a second heavy chain hypervariable region (HVR-H2), and a third heavy chain hypervariable region (HVR-H3); wherein:
   [0384] a. HVR-L1 comprises an amino acid sequence selected from TGSSSNIGAHYDVH (SEQ ID NO: 18), TGSSSNIGAGYDVH (SEQ ID NO: 22), RASQSVSSNYLA (SEQ ID NO: 38), or RASQTIYKYLN (SEQ ID NO: 42);
   [0385] b. HVR-L2 comprises an amino acid sequence selected from SNNNRPS (SEQ ID NO: 15), GNDNRPS (SEQ ID NO: 19), GNTNRPS (SEQ ID NO: 23), GNRNRPS (SEQ ID NO: 27), SASSLQS (SEQ ID NO: 39), or AASSLQS (SEQ ID NO: 43);
   [0386] c. HVR-L3 comprises an amino acid sequence selected from QSYDYSLRGYV (SEQ ID NO: 16), QSYDYSLSGYV (SEQ ID NO: 20), QSYDYSLRVYV (SEQ ID NO: 28), QSYDYSLKAYV (SEQ ID NO: 32), QSYDISLSGWV (SEQ ID NO: 36), QQTYSYPPT (SEQ ID NO: 40), or QQSSIPYT (SEQ ID NO: 44);
   [0387] d. HVR-H1 comprises an amino acid sequence selected from SAYAMHW (SEQ ID NO: 46), STSSYYW (SEQ ID NO: 50), SSTSYYW (SEQ ID NO: 54), GSRSYYW (SEQ ID NO: 58), STYAMSW (SEQ ID NO: 62), TSSNYYW (SEQ ID NO: 66), SSYGMH (SEQ ID NO: 70), SNYAIS (SEQ ID NO: 74), TSTNYYW (SEQ ID NO: 82), TSSNAYW (SEQ ID NO: 86), TASNYYW (SEQ ID NO: 90), TASNTYW (SEQ ID NO: 106), SDSSYYW (SEQ ID NO: 122), SESSYYW (SEQ ID NO: 126), STSSDYW (SEQ ID NO: 130), SNSSYYW (SEQ ID NO: 134), STSSYHW (SEQ ID NO: 142), SRSSYYW (SEQ ID NO: 146), XXXNXYX (SEQ ID NO: 251) wherein X at position 1 is T, D, E, or N; X at position 2 is S, A, E, G, K, Q, R, or T; X at position 3 is S, A, D, E, G, N, P, Q, or T; X at position 5 is Y, A, E, G, H, M, N, Q, S, T, or V; X at position 7 is W, F, I, V, or Y, or XXXXXXW (SEQ ID NO: 336) wherein X at position 1 is S or D; X at position 2 is T, A, D, E, G, H, K, N, P, Q, R, or S; X at position 3 is S, D, E, G, K, N, P, or R; X at position 4 is S, G, K, N, or P; X at position 5 is Y, A, D, E, G, H, M, N, Q, S, T, V, or W; X at position 6 is Y, A, F, G, H, M, N, or Q;
   [0388] e. HVR-H2 comprises an amino acid sequence selected from VISYDGTNEYYAD (SEQ ID NO: 47), SIYYTGNTYYNP (SEQ ID NO: 51), SIHYSGNTYYNP (SEQ ID NO: 55), SIHYSGTTYYNP (SEQ ID NO: 59), GISGGSGYTYYAD (SEQ ID NO: 63), SIDYTGSTYYNP (SEQ ID NO: 67), VISYGGSERYYAD (SEQ ID NO: 71), GILPILGTVDYAQ (SEQ ID NO: 75), NIDYTGSTYYNA (SEQ ID NO: 83), SIDYTGSTAYNP (SEQ ID NO: 87), SIDYTGSTYYNT (SEQ ID NO: 91), SIDYTGSTYYEP (SEQ ID NO: 99), SIDYTGSTYYEP (SEQ ID NO: 103), SIDYTGSTYYQP (SEQ ID NO: 119), SIYYTGNTYYNS (SEQ ID NO: 123), SIYYTGNTYYLP (SEQ ID NO: 131), SIYYTGNTYYMP (SEQ ID NO: 143), SIYYTGNTYYWP (SEQ ID NO: 147), SIYYTGETYYAP (SEQ ID NO: 151), XXDXXXXXXYXX (SEQ ID NO: 284) wherein X at position 1 is S, N, or T; X at position 2 is I, M, or V; X at position 4 is Y, or H; X at position 5 is T, H, L, or N; X at position 6 is G, A, D, E, H, K, N, Q, R, S, or T; X at position 7 is S, A, D, Q, or T; X at position 8 is T, A, D, or E; X at position 9 is Y, A, F, Q, S, or W; X at position 11 is N, D, E, H, P, or Q; X at position 12 is P, A, or E, or XXXXXXXXXYXP (SEQ ID NO: 379) wherein X at position 1 is S, F, I, M, or Q; X at position 2 is I, A, G, L, R, S, T, or V; X at position 3 is Y, A, D, E, F, G, H, K, L, M, N, P, Q, R, S, T, or W; X at position 4 is Y, A, D, E, F, G, H, K, N, P, Q, R, S, T, or W; X at position 5 is T, D, E, K, N, P, or Q; X at position 6 is G or Q; X at position 7 is N, D, E, G, H, I, K, M, P, R, or S; X at position 8 is T, A, E, F, G, H, K, P, Q, R, S, V, W, or Y; X at position 9 is Y or W; X at position 11 is N, A, D, E, K, L, M, P, Q, S or T; and
   [0389] f. HVR-H3 comprises an amino acid sequence selected from ARGIRIFTSYFDS (SEQ ID NO: 48), ARVRYGVGVPRYFDP (SEQ ID NO: 52), ARVHYGGYIPRRFDH (SEQ ID NO: 56), ARVAPSYPRVFDY (SEQ ID NO: 60), ARVVTYRDPPASFDY (SEQ ID NO: 64), ARGKYYETYLGFDV (SEQ ID NO: 68), AREPWYSSRGWTGYGFDV (SEQ ID NO: 72), AREPWYRLGAFDV (SEQ ID NO: 76), ATGKYYETYLGFDV (SEQ ID NO: 84), AHGKYYETYLGFDV (SEQ ID NO: 88), ATGSYYETYLGFDV (SEQ ID NO: 100), ATGNYYETYLGFDV (SEQ ID NO: 104), ASGKYYETYLGFDV (SEQ ID NO: 112), ARGNYYETYLGFDV (SEQ ID NO: 120), AGVRYGVGVPRYFDP (SEQ ID NO: 128), SRVRYGVGVPRYFDP (SEQ ID NO: 132), VRVRYGVGVPRYFDP (SEQ ID NO: 144), TRVRYGVGVPRYFDP (SEQ ID NO: 148), ARLRYGVGVPRYFDP (SEQ ID NO: 152), ARVKYGVGVPRYFDP (SEQ ID NO: 156), ARVRYGVGVPRHFDP (SEQ ID NO: 160), AXGXYYXTYLGFDV (SEQ ID NO: 322) wherein X at position 2 is R, A, E, G, H, M, N, Q, S, T, or Y; X at position 4 is K, A, or S; X at position 7 is E or T, or XXXXXGXXVPRXFDP (SEQ ID NO: 462) wherein X at position 1 is A or V; X at position 2 is R, A, G, N, Q, or T; X at position 3 is V, A, F, I, K, L, M, Q, or S; X at position 4 is R, A, I, K, L, M, P, Q, S, T, or V; X at position 5 is Y, H, I, L, or V; X at position 7 is V, A, F, G, K, M, N, Q, R, S, T, W, or Y; X at position 8 is G, N, R, S, or T; X at position 12 is Y, F, H, I, L, M, Q, or R.
[0390] <2> The antibody of clause <1> wherein:
   [0391] a. HVR-L1 comprises the amino acid sequence of SEQ ID NO: 18;
   [0392] b. HVR-L2 comprises the amino acid sequence of SEQ ID NO: 19; and
   [0393] c. HVR-L3 comprises the amino acid sequence of SEQ ID NO: 20.
[0394] <3> The antibody of any one of clauses <1>-<2> wherein:
   [0395] a. HVR-H1 comprises the amino acid sequence selected from SEQ ID NO: 66, 82, 86, 90, or 252-283;
   [0396] b. HVR-H2 comprises the amino acid sequence selected from SEQ ID NO: 67, 83, 87, 91, 99, 103, 119, or 285-321; and
   [0397] c. HVR-H3 comprises the amino acid sequence selected from SEQ ID NO: 68, 84, 88, 100, 104, 112, 120, or 323-335.
[0398] <4> The antibody of any one of clauses <1>-<2> wherein:
   [0399] a. HVR-H1 comprises an amino acid sequence selected from SEQ ID NO: 50, 122, 126, 130, 134, 138, 142, 146, or 337-378;
   [0400] b. HVR-H2 comprises an amino acid sequence selected from SEQ ID NO: 51, 123, 131, 143, 147, 151, or 380-461; and
   [0401] c. HVR-H3 comprises an amino acid sequence selected from SEQ ID NO: 52, 128, 132, 144, 148, 152, 156, 160, or 463-513.
[0402] <5> The antibody of clause <1> wherein:
   [0403] a. HVR-L1 comprises the amino acid sequence of SEQ ID NO: 18;
   [0404] b. HVR-L2 comprises the amino acid sequence of SEQ ID NO: 19;
   [0405] c. HVR-L3 comprises the amino acid sequence of SEQ ID NO: 20;
   [0406] d. HVR-H1 comprises the amino acid sequence selected from SEQ ID NO: 66, 82, 86, 90, or 252-283;
   [0407] e. HVR-H2 comprises the amino acid sequence selected from SEQ ID NO: 67, 83, 87, 91, 99, 103, 119, or 285-321; and
   [0408] f. HVR-H3 comprises the amino acid sequence selected from SEQ ID NO: 68, 84, 88, 100, 104, 112, 120, or 323-335.
[0409] <6> The antibody of clause <1> wherein:
   [0410] a. HVR-L1 comprises the amino acid sequence of SEQ ID NO: 18;
   [0411] b. HVR-L2 comprises the amino acid sequence of SEQ ID NO: 19;
   [0412] c. HVR-L3 comprises the amino acid sequence of SEQ ID NO: 20;
   [0413] d. HVR-H1 comprises an amino acid sequence selected from SEQ ID NO: 50, 122, 126, 130, 134, 138, 142, 146, or 337-378;
   [0414] e. HVR-H2 comprises an amino acid sequence selected from SEQ ID NO: 51, 123, 131, 143, 147, 151, or 380-461; and
   [0415] f. HVR-H3 comprises an amino acid sequence selected from SEQ ID NO: 52, 128, 132, 144, 148, 152, 156, 160, or 463-513.
[0416] <7> The antibody of any one of clauses <1>-<6> wherein the antibody comprises a light chain variable domain (V_{L}) amino acid sequence having at least 90% identity to a sequence selected from SEQ ID NO: 13, 17, 21, 25, 29, 33, 37, 41, 77, or 78; and/or a heavy chain variable domain (V_{H}) amino acid sequence having at least 90% identity to a sequence selected from SEQ ID NO: 45, 49, 53, 57, 61, 65, 69, 73, 79, 80, 81, 85, 89, 93, 97, 101, 105, 109, 113, 117, 121, 125, 129, 133, 137, 141, 145, 149, 153, 157, 161, or 165.
[0417] <8> The antibody of any one of clauses <1>-<6> wherein the antibody comprises a light chain variable domain (V_{L}) amino acid sequence having at least 90% identity to SEQ ID NO: 17 or 77; and/or a heavy chain variable domain (V_{H}) amino acid sequence having at least 90% identity to a sequence selected from SEQ ID NO: 49, 65, 79, 80, 81, 85, 89, 93, 97, 101, 105, 109, 113, 117, 121, 125, 129, 133, 137, 141, 145, 149, 153, 157, 161, or 165.
[0418] <9> The antibody of any one of clauses <1>-<6> wherein the antibody comprises a light chain variable domain (V_{L}) amino acid sequence having at least 90% identity to SEQ ID NO: 17 or 77; and/or a heavy chain variable domain (V_{H}) amino acid sequence having at least 90% identity to a sequence selected from SEQ ID NO: 65, 80, 81, 85, 89, 93, 97, 101, 105, 109, 113, or 117.
[0419] <10> The antibody of any one of clauses <1>-<6> wherein the antibody comprises a light chain variable domain (V_{L}) amino acid sequence having at least 90% identity to SEQ ID NO: 17 or 77; and/or a heavy chain variable domain (V_{H}) amino acid sequence having at least 90% identity to a sequence selected from SEQ ID NO: 49, 79, 121, 125, 129, 133, 137, 141, 145, 149, 153, 157, 161, or 165.
[0420] <11> The antibody of any one of clauses <1>-<10> wherein the antibody comprises a light chain (LC) amino acid sequence having at least 90% identity to SEQ ID NO: 169 or 242; and/or a heavy chain (HC) amino acid sequence having at least 90% identity to a sequence selected from SEQ ID NO: 170-202, 248-250, 518-616, and 743-751.
[0421] <12> The antibody of any one of clauses <1>-<10> wherein the antibody comprises a light chain (LC) amino acid sequence having at least 90% identity to SEQ ID NO: 169 or 242; and/or a heavy chain (HC) amino acid sequence having at least 90% identity to a sequence selected from SEQ ID NO: 203-241 and 617-733.
[0422] <13> An anti-IL-36 antibody comprising a light chain variable domain (V_{L}) amino acid sequence having at least 90% identity to a sequence selected from SEQ ID NO: 13, 17, 21, 25, 29, 33, 37, 41, 77, or 78; and/or a heavy chain variable domain (V_{H}) amino acid sequence having at least 90% identity to a sequence selected from SEQ ID NO: 45, 49, 53, 57, 61, 65, 69, 73, 79, 80, 81, 85, 89, 93, 97, 101, 105, 109, 113, 117, 121, 125, 129, 133, 137, 141, 145, 149, 153, 157, 161, or 165.
[0423] <14> An anti-IL-36 antibody comprising a light chain variable domain (V_{L}) amino acid sequence selected from SEQ ID NO: 13, 17, 21, 25, 29, 33, 37, 41, 77, or 78; and/or a heavy chain variable domain (V_{H}) amino acid sequence selected from SEQ ID NO: 45, 49, 53, 57, 61, 65, 69, 73, 79, 80, 81, 85, 89, 93, 97, 101, 105, 109, 113, 117, 121, 125, 129, 133, 137, 141, 145, 149, 153, 157, 161, or 165.
[0424] <15> An anti-IL-36 antibody comprising a light chain variable domain (V_{L}) amino acid sequence having at least 90% identity to SEQ ID NO: 17 or 77; and/or a heavy chain variable domain (V_{H}) amino acid sequence having at least 90% identity to a sequence selected from SEQ ID NO: 49, 65, 79, 80, 81, 85, 89, 93, 97, 101, 105, 109, 113, 117, 121, 125, 129, 133, 137, 141, 145, 149, 153, 157, 161, or 165.
[0425] <16> An anti-IL-36 antibody comprising a light chain variable domain (V_{L}) amino acid sequence of SEQ ID NO: 17 or 77; and/or a heavy chain variable domain (V_{H}) amino acid sequence selected from SEQ ID NO: 49, 65, 79, 80, 81, 85, 89, 93, 97, 101, 105, 109, 113, 117, 121, 125, 129, 133, 137, 141, 145, 149, 153, 157, 161, or 165.
[0426] <17> An anti-IL-36 antibody comprising a light chain variable domain (V_{L}) amino acid sequence having at least 90% identity to SEQ ID NO: 17 or 77; and/or a heavy chain variable domain (V_{H}) amino acid sequence having at least 90% identity to a sequence selected from SEQ ID NO: 65, 80, 81, 85, 89, 93, 97, 101, 105, 109, 113, or 117.
[0427] <18> An anti-IL-36 antibody comprising a light chain variable domain (V_{L}) amino acid sequence of SEQ ID NO: 17 or 77; and/or a heavy chain variable domain (V_{H}) amino acid sequence selected from SEQ ID NO: 65, 80, 81, 85, 89, 93, 97, 101, 105, 109, 113, or 117.
[0428] <19> An anti-IL-36 antibody comprising a light chain variable domain (V_{L}) amino acid sequence having at least 90% identity to SEQ ID NO: 17 or 77; and/or a heavy chain variable domain (V_{H}) amino acid sequence having at least 90% identity to a sequence selected from SEQ ID NO: 49, 79, 121, 125, 129, 133, 137, 141, 145, 149, 153, 157, 161, or 165.
[0429] <20> An anti-IL-36 antibody comprising a light chain variable domain (V_{L}) amino acid sequence of SEQ ID NO: 17 or 77; and/or a heavy chain variable domain (V_{H}) amino acid sequence selected from SEQ ID NO: 49, 79, 121, 125, 129, 133, 137, 141, 145, 149, 153, 157, 161, or 165.
[0430] <21> An anti-IL-36 antibody comprising a light chain (LC) amino acid sequence having at least 90% identity to SEQ ID NO: 169 or 242; and/or a heavy chain (HC) amino acid sequence having at least 90% identity to a sequence selected from SEQ ID NO: 170-202, 248, 249-250, 518-616, and 743-751.
[0431] <22> An anti-IL-36 antibody comprising a light chain (LC) amino acid sequence of SEQ ID NO: 169 or 242; and/or a heavy chain (HC) amino acid sequence selected from SEQ ID NO: 170-202, 248-250, 518-616, and 743-751.
[0432] <23> An anti-IL-36 antibody comprising a light chain (LC) amino acid sequence having at least 90% identity to SEQ ID NO: 169 or 242; and/or a heavy chain (HC) amino acid sequence having at least 90% identity to a sequence selected from SEQ ID NO: 203-241 and 617-733.
[0433] <24> An anti-IL-36 antibody comprising a light chain (LC) amino acid sequence of SEQ ID NO: 169 or 242; and/or a heavy chain (HC) amino acid sequence selected from SEQ ID NO: 206-241.
[0434] <25> An anti-IL-36 antibody wherein the antibody is a multispecific antibody comprising:
   [0435] a. a pair of light chains each comprising: HVR-L1 sequence of SEQ ID NO: 18; HVR-L2 sequence of SEQ ID NO: 19; and HVR-L3 sequence of SEQ ID NO: 20;
   [0436] b. a heavy chain comprising: HVR-H1 sequence selected from SEQ ID NOs: 66, 82, 86, 90, or 106; HVR-H2 sequence selected from SEQ ID NOs: 67, 83, 87, 91, 99, 103, or 119; and HVR-H3 sequence selected from SEQ ID NOs: 68, 84, 88, 100, 104, 112, or 120; and
   [0437] c. a heavy chain comprising: HVR-H1 sequence selected from SEQ ID NOs: 50, 122, 126, 130, 134, 142, or 146; HVR-H2 sequence selected from SEQ ID NOs: 51, 123, 127, 131, 135, 139, 143, 147, or 151; and HVR-H3 comprises an amino acid sequence selected from SEQ ID NOs: 52, 128, 132, 144, 148, 152, 156, or 160.
[0438] <26> The antibody of clause <25> wherein one of the heavy chains comprises an amino acid substitution T366W and the other heavy chain comprises amino acid substitutions T366S, L368A and Y407V.
[0439] <27> An anti-IL-36 antibody wherein the antibody is a multispecific antibody comprising:
   [0440] a. a pair of light chains each comprising a light chain variable domain (V_{L}) amino acid sequence of SEQ ID NO: 17 or 77;
   [0441] b. a heavy chain comprising a heavy chain variable domain (V_{H}) amino acid sequence selected from SEQ ID NO: 65, 80, 81, 85, 89, 93, 97, 101, 105, 109, 113, or 117; and
   [0442] c. a heavy chain comprising a heavy chain variable domain (V_{H}) amino acid sequence selected from SEQ ID NO: 49, 79, 121, 125, 129, 133, 137, 141, 145, 149, 153, 157, 161, or 165.
[0443] <28> An anti-IL-36 antibody wherein the antibody is a multispecific antibody comprising:
   [0444] a. a pair of light chain (LC) amino acid sequences of SEQ ID NO: 169 and 242;
   [0445] b. a heavy chain (HC) amino acid sequence selected from SEQ ID NO: 171, 174,177, 180, 183, 186, 189, 192, 195, 198, 201, and 249; and
   [0446] c. a heavy chain (HC) amino acid sequence selected from SEQ ID NO: 208, 211, 214, 217, 220, 223, 226, 229, 232, 235, 238, and 241.
[0447] <29> An anti-IL-36 antibody wherein the antibody is a multispecific antibody comprising:
   [0448] a. a pair of light chain (LC) amino acid sequences of SEQ ID NO: 169 and 242;
   [0449] b. a heavy chain (HC) amino acid sequence selected from SEQ ID NO: 172, 175, 178, 181, 184, 187, 190, 193, 196, 199, 202, 250; and
   [0450] c. a heavy chain (HC) amino acid sequence selected from SEQ ID NO: 207, 210, 213, 216, 219, 222, 225, 228, 231, 234, 237, and 240.
[0451] <30> A multispecific anti-IL-36 antibody wherein the antibody comprises a pair of light chain (LC) amino acid sequences of SEQ ID NO: 169; a heavy chain (HC) amino acid sequence of SEQ ID NO: 192; and a heavy chain (HC) amino acid sequence of SEQ ID NO: 235.
[0452] <31> The antibody of any one of clauses <1>-<30> wherein the antibody is a multispecific antibody comprising a specificity for IL-36α and IL-36γ in one arm, and a specificity for IL-36β in the other arm.
[0453] <32> The antibody of any one of clauses <1>-<31> wherein the antibody binds to hu-IL-36α, hu-IL-36β, and/or hu-IL-36γ with a binding affinity of 1×10⁻⁸ M or less, 1×10⁻⁹ M or less, 1×10⁻¹⁰ M or less, or 1×10⁻¹¹ M or less.
[0454] <33> The antibody of any one of clauses <1>-<32> wherein the antibody binds to hu-IL-36α and hu-IL-36γ with a binding affinity of 1×10⁻⁸ M or less, 1×10⁻⁹ M or less, 1×10⁻¹⁰ M or less, or 1×10⁻¹¹ M or less.
[0455] <34> The antibody of any one of clauses <1>-<33> wherein the antibody binds to hu-IL-36β with a binding affinity of 1×10⁻⁸ M or less, 1×10⁻⁹ M or less, 1×10⁻¹⁰ M or less, or 1×10⁻¹¹ M or less.
[0456] <35> The antibody of any one of clauses <1>-<34> wherein the antibody decreases an intracellular signal stimulated by IL-36α, IL-363, and/or IL-36γ by at least 90%, at least 95%, at least 99%, or 100%; optionally, wherein at an IL-36α, IL-36β, and/or IL-36γ concentration of about EC₅₀ the antibody has an IC₅₀ of 10 nM or less, 5 nM or less, or 1 nM or less.
[0457] <36> The antibody of any one of clauses <1>-<35> wherein the antibody inhibits release of IL-8 from primary human keratinocytes (PHKs) stimulated by IL-36α, IL-36β, and/or IL-36γ, optionally, wherein at an IL-36α, IL-36β, and/or IL-36γ concentration of about EC₅₀ the antibody has an IC₅₀ of 10 nM or less, 5 nM or less, or 1 nM or less.
[0458] <37> The antibody of any one of clauses <1>-<36> wherein the antibody cross-reacts with an IL-36α, IL-36β, or IL-36γ of cynomolgus monkey of SEQ ID NO: 5, 6, or 7.
[0459] <38> The antibody of any one of clauses <1>-<37> wherein the antibody is a monoclonal antibody.
[0460] <39> The antibody of any one of clauses <1>-<38> wherein the antibody is a recombinant antibody.
[0461] <40> The antibody of any one of clauses <1>-<39> wherein the antibody is a chimeric antibody.
[0462] <41> The antibody of any one of clauses <1>-<39> wherein the antibody is a humanized or human antibody.
[0463] <42> The antibody of any one of clauses <1>-<41> wherein the antibody is an antibody fragment, optionally selected from the group consisting of F(ab′)₂, Fab′, Fab, Fv, single domain antibody (VHH), single-arm antibody, and scFv.
[0464] <43> The antibody of any one of clauses <1>-<42> wherein the antibody is a full-length antibody of class IgG; optionally, wherein the class IgG antibody has an isotype selected from IgG1, IgG2, IgG3, and IgG4.
[0465] <44> The antibody of clause <43> wherein the antibody is an Fc region variant; optionally wherein the Fc region variant alters effector function or alters half-life.
[0466] <45> The antibody of clause <44> wherein the Fc region variant decreases effector function and/or results in an effectorless antibody; optionally, wherein the Fc region variant comprises an amino acid substitution at position 297 resulting in effectorless function.
[0467] <46> The antibody of any one of clauses <1>-<45> wherein the antibody is an immunoconjugate; optionally, wherein the immunoconjugate comprises a therapeutic agent for treatment of IL-36 mediated condition or disease; optionally, wherein the therapeutic agent is a chemotherapeutic agent or cytotoxic agent for the treatment of cancer.
[0468] <47> The antibody of any one of clauses <1>-<47> wherein the antibody is a synthetic antibody comprising the CDRs grafted onto a scaffold other than an immunoglobulin scaffold or immunoglobulin framework, optionally a scaffold selected from an alternative protein scaffold, and an artificial polymer scaffold.
[0469] <48> An anti-IL-36 antibody that specifically binds to the same epitope as the antibody of any one of clauses <1>-<48>.
[0470] <49> A multispecific antibody that binds to each of human IL-36α, IL-36β, and IL-36γ; optionally, wherein the antibody binds to each of human IL-36α, IL-36β, and IL-36γ with a binding affinity of 3 nM or less; optionally wherein the binding affinity is measured by equilibrium dissociation constant (K_{D}) to a hu-IL-36α of SEQ ID NO:1, a hu-IL-36β of SEQ ID NO:2, and a hu-IL-36γ of SEQ ID NO:3; optionally, wherein:
   [0471] a. comprises a specificity for IL-36α and/or IL-36γ in one arm, and a specificity for IL-36β in the other arm; optionally, wherein one arm binds to hu-IL-36α and hu-IL-36γ with a binding affinity of 1×10⁻⁹ M or less, 1×10⁻¹⁰ M or less, or 1×10⁻¹¹ M or less, and the other arm binds to hu-IL-36β with a binding affinity of 1×10⁻⁹ M or less, 1×10⁻¹⁰ M or less, or 1×10⁻¹¹ M or less;
   [0472] b. decreases an intracellular signal stimulated by IL-36α, IL-36β, and/or IL-36γ by at least 90%, at least 95%, at least 99%, or 100%; optionally, wherein at an IL-36α, IL-36β, and/or IL-36γ concentration of about EC₅₀ the antibody has an IC₅₀ of 10 nM or less, 5 nM or less, or 1 nM or less;
   [0473] c. inhibits release of IL-8 from primary human keratinocytes (PHKs) stimulated by IL-36α, IL-36β, and/or IL-36γ, optionally, wherein at an IL-36α, IL-36β, and/or IL-36γ concentration of about EC₅₀ the antibody has an IC₅₀ of 10 nM or less, 5 nM or less, or 1 nM or less;
   [0474] d. the antibody cross-reacts with an IL-36α, IL-36β, and IL-36γ of cynomolgus monkey; and/or
   [0475] e. the antibody binds to each of cynomolgus monkey IL-36α, IL-36β, and IL-36γ with a binding affinity of 3 nM or less; optionally wherein the binding affinity is measured by equilibrium dissociation constant (K_{D}) to a cy-IL-36α of SEQ ID NO:5, a cy-IL-36β of SEQ ID NO:6, and a cy-IL-36γ of SEQ ID NO:7.
[0476] <50> An isolated polynucleotide encoding the antibody of any one of clauses <1>-<49>.
[0477] <51> The polynucleotide of clause <50> further comprising a nucleotide sequence encoding a signal peptide (SP).
[0478] <52> The polynucleotide of clause <50> wherein the polynucleotide encodes a light chain and a heavy chain.
[0479] <53> The polynucleotide of clause <50> wherein the polynucleotide comprises a polynucleotide sequence comprising one or more codons selected for optimal expression of the antibody in a mammalian cell.
[0480] <54> The polynucleotide of clause <50> wherein the polynucleotide sequence comprises one or more codons selected for optimal expression of the antibody in a Chinese Hamster Ovary (CHO) cell.
[0481] <55> A vector comprising a polynucleotide of any one of clauses <50>-<54>.
[0482] <56> An isolated host cell comprising the vector of clause <55>.
[0483] <57> A host cell comprising a polynucleotide of any one of clauses <50>-<54>.
[0484] <58> An isolated host cell that expresses the antibody of any one of clauses <1>-<49>.
[0485] <59> The host cell of clause <56> wherein the host cell is selected from a Chinese hamster ovary (CHO) cell, a myeloma cell (e.g., Y0, NS0, Sp2/0), a monkey kidney cell (COS-7), a human embryonic kidney line (293), a baby hamster kidney cell (BHK), a mouse Sertoli cell (e.g., TM4), an African green monkey kidney cell (VERO-76), a human cervical carcinoma cell (HELA), a canine kidney cell, a human lung cell (W138), a human liver cell (Hep G2), a mouse mammary tumor cell, a TR1 cell, an Medical Research Council 5 (MRC 5) cell, and a Foreskin 4 (FS4) cell.
[0486] <60> A method of producing an antibody comprising culturing the host cell of any one of clauses <56>-<59> so that an antibody is produced.
[0487] <61> A hybridoma that produces an antibody of any one of clauses <1>-<49>.
[0488] <62> A pharmaceutical composition comprising an antibody of any one of clauses <1>-<49> and a pharmaceutically acceptable carrier.
[0489] <63> The pharmaceutical composition of clause <62>, wherein the composition further comprises a therapeutic agent for treatment of an IL-36-mediated disease or condition; optionally, wherein the therapeutic agent is a chemotherapeutic agent.
[0490] <64> A method of treating an IL-36-mediated disease in a subject, comprising administering to the subject a therapeutically effective amount of an antibody of any one of clauses <1>-<49> or a therapeutically effective amount of a pharmaceutical composition of clause <62>.
[0491] <65> A method of treating a disease mediated by IL-36α, IL-36β, and/or IL-36γ stimulated signaling in a subject, the method comprising administering to the subject a therapeutically effective amount of an antibody of any one of clauses <1>-<49> or a therapeutically effective amount of a pharmaceutical composition of clause <62>.
[0492] <66> The method of any one of clauses <64>-<65> wherein the disease is selected from: acne due to epidermal growth factor receptor inhibitors, acne and suppurative hidradenitis (PASH), acute generalized exanthematous pustulosis (AGEP), amicrobial pustulosis of the folds, amicrobial pustulosis of the scalp/leg, amicrobial subcorneal pustulosis, aseptic abscess syndrome, Behget's disease, bowel bypass syndrome, chronic obstructive pulmonary disease (COPD), childhood pustular dermatosis, Crohn's disease, deficiency of the interleukin-1 receptor antagonist (DIRA), deficiency of interleukin-36 receptor antagonist (DITRA), eczema, generalized pustular psoriasis (GPP), erythema elevatum diutinum, hidradenitis suppurativa, IgA pemphigus, inflammatory bowel disease (IBD), neutrophilic panniculitis, palmoplantar pustular psoriasis (PPP), psoriasis, psoriatic arthritis, pustular psoriasis (DIRA, DITRA), pyoderma gangrenosum, pyogenic arthritis pyoderma gangrenosum and acne (PAPA), pyogenic arthritis pyoderma gangrenosum acne and suppurative hidradenitis (PAPASH), rheumatoid neutrophilic dermatosis, synovitis acne pustulosis hyperostosis and osteitis (SAPHO), TNF-induced psoriasis form skin lesions in Crohn's patients, Sjogren's syndrome, Sweet's syndrome, systemic lupus erythematosus (SLE), ulcerative colitis, and uveitis.
[0493] <67> The method of clause <66> wherein the disease is selected from: generalized pustular psoriasis (GPP), palmoplantar pustular psoriasis (PPP), and psoriasis.
[0494] <68> A method of treating psoriasis in a subject, the method comprising administering to the subject a therapeutically effective amount of an antibody of any one of clauses <1>-<49> or a therapeutically effective amount of a pharmaceutical composition of clause <62>.
[0495] <69> A method of treating cancer in a subject, the method comprising administering to the subject a therapeutically effective amount of an antibody of any one of clauses <1>-<49> or a therapeutically effective amount of a pharmaceutical composition of clause <62>; optionally, wherein the cancer is selected from breast cancer, colorectal cancer, non-small cell lung cancer, pancreatic cancer.

[0496] The following represent further numbered embodiments of the present invention:
[0497] «1» An anti-IL-36 antibody comprising: (i) a first light chain hypervariable region (HVR-L1), a second light chain hypervariable region (HVR-L2), and a third light chain hypervariable region (HVR-L3), and/or (ii) a first heavy chain hypervariable region (HVR-H1), a second heavy chain hypervariable region (HVR-H2), and a third heavy chain hypervariable region (HVR-H3); wherein:
   [0498] a. HVR-L1 comprises an amino acid sequence selected from TGSSSNIGAHYDVH (SEQ ID NO: 18), TGSSSNIGAGYDVH (SEQ ID NO: 22), RASQSVSSNYLA (SEQ ID NO: 38), or RASQTIYKYLN (SEQ ID NO: 42);
   [0499] b. HVR-L2 comprises an amino acid sequence selected from SNNNRPS (SEQ ID NO: 15), GNDNRPS (SEQ ID NO: 19), GNTNRPS (SEQ ID NO: 23), GNRNRPS (SEQ ID NO: 27), SASSLQS (SEQ ID NO: 39), or AASSLQS (SEQ ID NO: 43);
   [0500] c. HVR-L3 comprises an amino acid sequence selected from QSYDYSLRGYV (SEQ ID NO: 16), QSYDYSLSGYV (SEQ ID NO: 20), QSYDYSLRVYV (SEQ ID NO: 28), QSYDYSLKAYV (SEQ ID NO: 32), QSYDISLSGWV (SEQ ID NO: 36), QQTYSYPPT (SEQ ID NO: 40), or QQSSIPYT (SEQ ID NO: 44);
   [0501] d. HVR-H1 comprises an amino acid sequence selected from SAYAMHW (SEQ ID NO: 46), STSSYYW (SEQ ID NO: 50), SSTSYYW (SEQ ID NO: 54), GSRSYYW (SEQ ID NO: 58), STYAMSW (SEQ ID NO: 62), TSSNYYW (SEQ ID NO: 66), SSYGMH (SEQ ID NO: 70), SNYAIS (SEQ ID NO: 74), TSTNYYW (SEQ ID NO: 82), TSSNAYW (SEQ ID NO: 86), TASNYYW (SEQ ID NO: 90), TASNTYW (SEQ ID NO: 106), SDSSYYW (SEQ ID NO: 122), SESSYYW (SEQ ID NO: 126), STSSDYW (SEQ ID NO: 130), SNSSYYW (SEQ ID NO: 134), STSSYHW (SEQ ID NO: 142), SRSSYYW (SEQ ID NO: 146), XXXNXYX (SEQ ID NO: 251) wherein X at position 1 is T, D, E, or N; X at position 2 is S, A, E, G, K, Q, R, or T; X at position 3 is S, A, D, E, G, N, P, Q, or T; X at position 5 is Y, A, E, G, H, M, N, Q, S, T, or V; X at position 7 is W, F, I, V, or Y, or XXXXXXW (SEQ ID NO: 336) wherein X at position 1 is S or D; X at position 2 is T, A, D, E, G, H, K, N, P, Q, R, or S; X at position 3 is S, D, E, G, K, N, P, or R; X at position 4 is S, G, K, N, or P; X at position 5 is Y, A, D, E, G, H, M, N, Q, S, T, V, or W; X at position 6 is Y, A, F, G, H, M, N, or Q;
   [0502] e. HVR-H2 comprises an amino acid sequence selected from VISYDGTNEYYAD (SEQ ID NO: 47), SIYYTGNTYYNP (SEQ ID NO: 51), SIHYSGNTYYNP (SEQ ID NO: 55), SIHYSGTTYYNP (SEQ ID NO: 59), GISGGSGYTYYAD (SEQ ID NO: 63), SIDYTGSTYYNP (SEQ ID NO: 67), VISYGGSERYYAD (SEQ ID NO: 71), GILPILGTVDYAQ (SEQ ID NO: 75), NIDYTGSTYYNA (SEQ ID NO: 83), SIDYTGSTAYNP (SEQ ID NO: 87), SIDYTGSTYYNT (SEQ ID NO: 91), SIDYTGSTYYEP (SEQ ID NO: 99), SIDYTGSTYYEP (SEQ ID NO: 103), SIDYTGSTYYQP (SEQ ID NO: 119), SIYYTGNTYYNS (SEQ ID NO: 123), SIYYTGNTYYLP (SEQ ID NO: 131), SIYYTGNTYYMP (SEQ ID NO: 143), SIYYTGNTYYWP (SEQ ID NO: 147), SIYYTGETYYAP (SEQ ID NO: 151), XXDXXXXXXYXX (SEQ ID NO: 284) wherein X at position 1 is S, N, or T; X at position 2 is I, M, or V; X at position 4 is Y, or H; X at position 5 is T, H, L, or N; X at position 6 is G, A, D, E, H, K, N, Q, R, S, or T; X at position 7 is S, A, D, Q, or T; X at position 8 is T, A, D, or E; X at position 9 is Y, A, F, Q, S, or W; X at position 11 is N, D, E, H, P, or Q; X at position 12 is P, A, or E, or XXXXXXXXXYXP (SEQ ID NO: 379) wherein X at position 1 is S, F, I, M, or Q; X at position 2 is I, A, G, L, R, S, T, or V; X at position 3 is Y, A, D, E, F, G, H, K, L, M, N, P, Q, R, S, T, or W; X at position 4 is Y, A, D, E, F, G, H, K, N, P, Q, R, S, T, or W; X at position 5 is T, D, E, K, N, P, or Q; X at position 6 is G or Q; X at position 7 is N, D, E, G, H, I, K, M, P, R, or S; X at position 8 is T, A, E, F, G, H, K, P, Q, R, S, V, W, or Y; X at position 9 is Y or W; X at position 11 is N, A, D, E, K, L, M, P, Q, S or T;
   [0503] f. HVR-H3 comprises an amino acid sequence selected from ARGIRIFTSYFDS (SEQ ID NO: 48), ARVRYGVGVPRYFDP (SEQ ID NO: 52), ARVHYGGYIPRRFDH (SEQ ID NO: 56), ARVAPSYPRVFDY (SEQ ID NO: 60), ARVVTYRDPPASFDY (SEQ ID NO: 64), ARGKYYETYLGFDV (SEQ ID NO: 68), AREPWYSSRGWTGYGFDV (SEQ ID NO: 72), AREPWYRLGAFDV (SEQ ID NO: 76), ATGKYYETYLGFDV (SEQ ID NO: 84), AHGKYYETYLGFDV (SEQ ID NO: 88), ATGSYYETYLGFDV (SEQ ID NO: 100), ATGNYYETYLGFDV (SEQ ID NO: 104), ASGKYYETYLGFDV (SEQ ID NO: 112), ARGNYYETYLGFDV (SEQ ID NO: 120), AGVRYGVGVPRYFDP (SEQ ID NO: 128), SRVRYGVGVPRYFDP (SEQ ID NO: 132), VRVRYGVGVPRYFDP (SEQ ID NO: 144), TRVRYGVGVPRYFDP (SEQ ID NO: 148), ARLRYGVGVPRYFDP (SEQ ID NO: 152), ARVKYGVGVPRYFDP (SEQ ID NO: 156), ARVRYGVGVPRHFDP (SEQ ID NO: 160), AXGXYYXTYLGFDV (SEQ ID NO: 322) wherein X at position 2 is R, A, E, G, H, M, N, Q, S, T, or Y; X at position 4 is K, A, or S; X at position 7 is E or T, or XXXXXGXXVPRXFDP (SEQ ID NO: 462) wherein X at position 1 is A or V; X at position 2 is R, A, G, N, Q, or T; X at position 3 is V, A, F, I, K, L, M, Q, or S; X at position 4 is R, A, I, K, L, M, P, Q, S, T, or V; X at position 5 is Y, H, I, L, or V; X at position 7 is V, A, F, G, K, M, N, Q, R, S, T, W, or Y; X at position 8 is G, N, R, S, or T; X at position 12 is Y, F, H, I, L, M, Q, or R.
[0504] «2» The antibody of «1» wherein:
   [0505] a. HVR-L1 comprises the amino acid sequence of SEQ ID NO: 18;
   [0506] b. HVR-L2 comprises the amino acid sequence of SEQ ID NO: 19; and
   [0507] c. HVR-L3 comprises the amino acid sequence of SEQ ID NO: 20.
[0508] «3» The antibody of any one of «1»-«2», wherein:
   [0509] a. HVR-H1 comprises the amino acid sequence selected from SEQ ID NO: 66, 82, 86, 90, or 252-283;
   [0510] b. HVR-H2 comprises the amino acid sequence selected from SEQ ID NO: 67, 83, 87, 91, 99, 103, 119, or 285-321; and
   [0511] c. HVR-H3 comprises the amino acid sequence selected from SEQ ID NO: 68, 84, 88, 100, 104, 112, 120, or 323-335.
[0512] «4» The antibody of any one of «1»-«2» wherein:
   [0513] a. HVR-H1 comprises an amino acid sequence selected from SEQ ID NO: 50, 122, 126, 130, 134, 138, 142, 146, or 337-378;
   [0514] b. HVR-H2 comprises an amino acid sequence selected from SEQ ID NO: 51, 123, 131, 143, 147, 151, or 380-461; and c. HVR-H3 comprises an amino acid sequence selected from SEQ ID NO: 52, 128, 132, 144, 148, 152, 156, 160, or 463-513.
[0515] «5» The antibody of any one of «1»-«4» wherein the antibody comprises a light chain variable domain (V_{L}) amino acid sequence having at least 90% identity to a sequence selected from SEQ ID NO: 13, 17, 21, 25, 29, 33, 37, 41, 77, or 78; and/or a heavy chain variable domain (V_{H}) amino acid sequence having at least 90% identity to a sequence selected from SEQ ID NO: 45, 49, 53, 57, 61, 65, 69, 73, 79, 80, 81, 85, 89, 93, 97, 101, 105, 109, 113, 117, 121, 125, 129, 133, 137, 141, 145, 149, 153, 157, 161, or 165.
[0516] «6» The antibody of any one of «1»-«5» wherein the antibody comprises a light chain variable domain (V_{L}) amino acid sequence having at least 90% identity to SEQ ID NO: 17 or 77; and/or
   [0517] a heavy chain variable domain (V_{H}) amino acid sequence having at least 90% identity to a sequence selected from SEQ ID NO: 49, 65, 79, 80, 81, 85, 89, 93, 97, 101, 105, 109, 113, 117, 121, 125, 129, 133, 137, 141, 145, 149, 153, 157, 161, or 165;
   [0518] a heavy chain variable domain (V_{H}) amino acid sequence having at least 90% identity to a sequence selected from SEQ ID NO: 65, 80, 81, 85, 89, 93, 97, 101, 105, 109, 113, or 117; or
   [0519] a heavy chain variable domain (V_{H}) amino acid sequence having at least 90% identity to a sequence selected from SEQ ID NO: 49, 79, 121, 125, 129, 133, 137, 141, 145, 149, 153, 157, 161, or 165.
[0520] «7» The antibody of any one of «1»-«6» wherein the antibody comprises:
   [0521] a light chain (LC) amino acid sequence having at least 90% identity to SEQ ID NO: 169 or 242; and/or a heavy chain (HC) amino acid sequence having at least 90% identity to a sequence selected from SEQ ID NO: 170-202, 248-250, 518-616, and 743-751; or
   [0522] a light chain (LC) amino acid sequence having at least 90% identity to SEQ ID NO: 169 or 242; and/or a heavy chain (HC) amino acid sequence having at least 90% identity to a sequence selected from SEQ ID NO: 203-241, and 617-733.
[0523] «8» The antibody of «1» wherein the antibody is a multispecific antibody comprising:
   [0524] a. a pair of light chains each comprising: HVR-L1 sequence of SEQ ID NO: 18; HVR-L2 sequence of SEQ ID NO: 19; and HVR-L3 sequence of SEQ ID NO: 20;
   [0525] b. a heavy chain comprising: HVR-H1 sequence selected from SEQ ID NOs: 66, 82, 86, 90, or 106; HVR-H2 sequence selected from SEQ ID NOs: 67, 83, 87, 91, 99, 103, or 119; and HVR-H3 sequence selected from SEQ ID NOs: 68, 84, 88, 100, 104, 112, or 120; and
   [0526] c. a heavy chain comprising: HVR-H1 sequence selected from SEQ ID NOs: 50, 122, 126, 130, 134, 142, or 146; HVR-H2 sequence selected from SEQ ID NOs: 51, 123, 127, 131, 135, 139, 143, 147, or 151; and HVR-H3 comprises an amino acid sequence selected from SEQ ID NOs: 52, 128, 132, 144, 148, 152, 156, or 160; optionally, wherein:
      [0527] one of the heavy chains comprises an amino acid substitution T366W and the other heavy chain comprises amino acid substitutions T366S, L368A and Y407V; and/or the antibody comprises:
         [0528] i. a pair of light chains each comprising a light chain variable domain (V_{L}) amino acid sequence of SEQ ID NO: 17 or 77;
         [0529] ii. a heavy chain comprising a heavy chain variable domain (V_{H}) amino acid sequence selected from SEQ ID NO: 65, 80, 81, 85, 89, 93, 97, 101, 105, 109, 113, or 117; and
         [0530] iii. a heavy chain comprising a heavy chain variable domain (V_{H}) amino acid sequence selected from SEQ ID NO: 49, 79, 121, 125, 129, 133, 137, 141, 145, 149, 153, 157, 161, or 165.
[0531] «9» The antibody of any one of «1»-«8» wherein the antibody binds to hu-IL-36α, hu-IL-36β, and/or hu-IL-36γ with a binding affinity of 1×10⁻⁸ M or less, 1×10⁻⁹ M or less, 1×10⁻¹⁰ M or less, or 1×10⁻¹¹ M or less;
   [0532] the antibody binds to hu-IL-36α and hu-IL-36γ with a binding affinity of 1×10⁻⁸ M or less, 1×10⁻⁹ M or less, 1×10⁻¹⁰ M or less, or 1×10⁻¹¹ M or less;
   [0533] the antibody binds to hu-IL-36β with a binding affinity of 1×10⁻⁸ M or less, 1×10⁻⁹ M or less, 1×10⁻¹⁰ M or less, or 1×10⁻¹¹ M or less;
   [0534] the antibody decreases an intracellular signal stimulated by IL-36α, IL-36β, and/or IL-36γ by at least 90%, at least 95%, at least 99%, or 100%; optionally, wherein at an IL-36α, IL-36β, and/or IL-36γ concentration of about EC₅₀ the antibody has an IC₅₀ of 10 nM or less, 5 nM or less, or 1 nM or less;
   [0535] the antibody inhibits release of IL-8 from primary human keratinocytes (PHKs) stimulated by IL-36α, IL-36β, and/or IL-36γ, optionally, wherein at an IL-36α, IL-36β, and/or IL-36γ concentration of about EC₅₀ the antibody has an IC₅₀ of 10 nM or less, 5 nM or less, or 1 nM or less; and/or
   [0536] the antibody cross-reacts with an IL-36α, IL-36β, or IL-36γ of cynomolgus monkey of SEQ ID NO: 5, 6, or 7.
[0537] «10» A multispecific antibody that binds to each of human IL-36α, IL-36β, and IL-36γ; optionally, wherein the antibody binds to each of human IL-36α, IL-36β, and IL-36γ with a binding affinity of 3 nM or less; optionally wherein the binding affinity is measured by equilibrium dissociation constant (K_{D}) to a hu-IL-36α of SEQ ID NO:1, a hu-IL-36β of SEQ ID NO:2, and a hu-IL-36γ of SEQ ID NO:3; optionally, wherein the antibody:
   [0538] a. comprises a specificity for IL-36α and/or IL-36γ in one arm, and a specificity for IL-36β in the other arm; optionally, wherein one arm binds to hu-IL-36α and hu-IL-36γ with a binding affinity of 1×10⁻⁹ M or less, 1×10⁻¹⁰ M or less, or 1×10⁻¹¹ M or less, and the other arm binds to hu-IL-36β with a binding affinity of 1×10⁻⁹ M or less, 1×10⁻¹⁰ M or less, or 1×10⁻¹¹ M or less;
   [0539] b. decreases an intracellular signal stimulated by IL-36α, IL-36β, and/or IL-36γ by at least 90%, at least 95%, at least 99%, or 100%; optionally, wherein at an IL-36α, IL-36β, and/or IL-36γ concentration of about EC₅₀ the antibody has an IC₅₀ of 10 nM or less, 5 nM or less, or 1 nM or less;
   [0540] c. inhibits release of IL-8 from primary human keratinocytes (PHKs) stimulated by IL-36α, IL-36β, and/or IL-36γ, optionally, wherein at an IL-36α, IL-36β, and/or IL-36γ concentration of about EC₅₀ the antibody has an IC₅₀ of 10 nM or less, 5 nM or less, or 1 nM or less;
   [0541] d. cross-reacts with an IL-36α, IL-36β, and IL-36γ of cynomolgus monkey; and/or
   [0542] e. the antibody binds to each of cynomolgus monkey IL-36α, IL-36β, and IL-36γ with a binding affinity of 3 nM or less; optionally wherein the binding affinity is measured by equilibrium dissociation constant (K_{D}) to a cy-IL-36α of SEQ ID NO:5, a cy-IL-36β of SEQ ID NO:6, and a cy-IL-36γ of SEQ ID NO:7.
[0543] «11» An isolated polynucleotide or vector encoding the antibody of any one of «1»-«10»; or an isolated host cell comprising the polynucleotide or vector; optionally wherein the host cell is selected from a Chinese hamster ovary (CHO) cell, a myeloma cell (e.g., Y0, NS0, Sp2/0), a monkey kidney cell (COS-7), a human embryonic kidney line (293), a baby hamster kidney cell (B-K), a mouse Sertoli cell (e.g., TM4), an African green monkey kidney cell (VERO-76), a human cervical carcinoma cell (HELA), a canine kidney cell, a human lung cell (W138), a human liver cell (Hep G2), a mouse mammary tumor cell, a TR1 cell, an Medical Research Council 5 (MRC 5) cell, and a Foreskin 4 (FS4) cell.
[0544] «12» A method of producing an antibody comprising culturing the host cell of «11» so that an antibody is produced.
[0545] «13» A pharmaceutical composition comprising an antibody of any one of «1»-«10» and a pharmaceutically acceptable carrier.
[0546] «14» A method of treating a subject, the method comprising administering to the subject a therapeutically effective amount of an antibody of any one of «1»-«10» or a therapeutically effective amount of a pharmaceutical composition of «13»; optionally, wherein the disease is selected from: acne due to epidermal growth factor receptor inhibitors, acne and suppurative hidradenitis (PASH), acute generalized exanthematous pustulosis (AGEP), amicrobial pustulosis of the folds, amicrobial pustulosis of the scalp/leg, amicrobial subcorneal pustulosis, aseptic abscess syndrome, Behget's disease, bowel bypass syndrome, chronic obstructive pulmonary disease (COPD), childhood pustular dermatosis, Crohn's disease, deficiency of the interleukin-1 receptor antagonist (DIRA), deficiency of interleukin-36 receptor antagonist (DITRA), eczema, generalized pustular psoriasis (GPP), erythema elevatum diutinum, hidradenitis suppurativa, IgA pemphigus, inflammatory bowel disease (IBD), neutrophilic panniculitis, palmoplantar pustular psoriasis (PPP), psoriasis, psoriatic arthritis, pustular psoriasis (DIRA, DITRA), pyoderma gangrenosum, pyogenic arthritis pyoderma gangrenosum and acne (PAPA), pyogenic arthritis pyoderma gangrenosum acne and suppurative hidradenitis (PAPASH), rheumatoid neutrophilic dermatosis, synovitis acne pustulosis hyperostosis and osteitis (SAPHO), TNF-induced psoriasis form skin lesions in Crohn's patients, Sjogren's syndrome, Sweet's syndrome, systemic lupus erythematosus (SLE), ulcerative colitis, uveitis, and cancer; optionally, wherein the cancer is selected from breast cancer, colorectal cancer, non-small cell lung cancer, pancreatic cancer.
[0547] «15» The antibody of any one of «1»-«10» for use as a medicament; optionally, for use in the treatment of an inflammatory condition.

[0548] In a further embodiment, any of the antibodies disclosed above in «1» to «10» may have been further modified to incorporate any of the modifications set out herein, in particular any of the heavy chain modifications set out herein, and preferably any of those set out herein for the heavy chain constant regions. The antibodies may have been modified to have a C-terminal Lysine at the end of each heavy chain. In one particularly preferred embodiment that may have been modified to include the “LALA” modification. In another particularly preferred embodiment, they may have been modified to include the knobs-in-holes modifications set out herein and/or the modifications for formation of disulphide bridges.

[0549] In a further embodiment, in any of the above discussed embodiments the antibody may be modified to have, or already have, one of the specific modifications disclosed herein. In a preferred embodiment the antibody may be modified to have, or already have, any of the combinations of modifications disclosed here,

[0550] While the foregoing disclosure of the present invention has been described in some detail by way of example and illustration for purposes of clarity and understanding, this disclosure including the examples, descriptions, and embodiments described herein are for illustrative purposes, are intended to be exemplary, and should not be construed as limiting the present disclosure. It will be clear to one skilled in the art that various modifications or changes to the examples, descriptions, and embodiments described herein can be made and are to be included within the spirit and purview of this disclosure and the appended claims. Further, one of skill in the art will recognize a number of equivalent methods and procedure to those described herein. All such equivalents are to be understood to be within the scope of the present disclosure and are covered by the appended claims.

[0551] Additional embodiments of the invention are set forth in the following claims.

[0552] The disclosures of all publications, patent applications, patents, or other documents mentioned herein are expressly incorporated by reference in their entirety for all purposes to the same extent as if each such individual publication, patent, patent application or other document were individually specifically indicated to be incorporated by reference herein in its entirety for all purposes and were set forth in its entirety herein. In case of conflict, the present specification, including specified terms, will control.

### REFERENCES

[0553] Towne, et al., (2011) “Interleukin-36 (IL-36) ligands require processing for full agonist (IL-36α, IL-36β, and IL-36γ) or antagonist (IL-36Ra) activity” J. Biol. Chem., vol. 284, pp. 42594-42602
[0554] Foote, et al., (1992) “Antibody framework residues affecting the conformation of the hypervariable loops” J. Mol. Biol., vol. 224, pp. 487-499
[0555] Hotzel, et al., (2012) “A strategy for risk mitigation of antibodies with fast clearance” mAbs, vol. 4, no. 6, pp. 753-760
[0556] Brenner, et al., (1992) “Encoded combinatorial chemistry” Proc. Natl. Acad. Sci. USA, vol. 89, no. 12, pp. 5381-5383
[0557] Kunkel, et al., (1987) “Rapid and efficient site-specific mutagenesis without phenotypic selection” Methods Enzymol., vol. 154, pp. 367-382
[0558] Masella, et al., (2012) “PANDAseq: paired-end assembler for illumina sequences” BMC Bioinformatics, vol. 13, pp. 31
[0559] Koenig, et al., (2015) “Mutational landscape of antibody variable domains reveals a switch modulating the interdomain conformational dynamics and antigen binding” J. Biol. Chem., vol. 290, no. 36, pp. 21773-21786
[0560] John B. B. Ridgway, et al., (1996) “‘Knobs-into-holes’ engineering of antibody CH3 domains for heavy chain heterodimerization” Protein Engineering, vol. 9, no. 7, pp. 617-621

The application's sequence listing, which the Patent Office published only in electronic form, follows.

SEQUENCE LISTING (827 sequences)

SEQ ID NO: 1 - protein, 153 aa, artificial
  Synthetic polypeptide
KIDTPQQGSIQDINHRVWVLQDQTLIAVPRKDRMSPVTIALISCRHVETLEKDRGNPIYLGLNGLNLCLMCAKVGDQPTLQLKEKDIMDLYNQPEPVKSFLFYHSQSGRNSTFESVAFPGWFIAVSSEGGCPLILTQELGKANTTDFGLTMLF

SEQ ID NO: 2 - protein, 153 aa, artificial
  Synthetic polypeptide
REAAPKSYAIRDSRQMVWVLSGNSLIAAPLSRSIKPVTLHLIACRDTEFSDKEKGNMVYLGIKGKDLCLFCAEIQGKPTLQLKEKNIMDLYVEKKAQKPFLFFHNKEGSTSVFQSVSYPGWFIATSTTSGQPIFLTKERGITNNTNFYLDSVE

SEQ ID NO: 3 - protein, 152 aa, artificial
  Synthetic polypeptide
SMCKPITGTINDLNQQVWTLQGQNLVAVPRSDSVTPVTVAVITCKYPEALEQGRGDPIYLGIQNPEMCLYCEKVGEQPTLQLKEQKIMDLYGQPEPVKPFLFYRAKTGRTSTLESVAFPDWFIASSKRDQPIILTSELGKSYNTAFELNIND

SEQ ID NO: 4 - protein, 154 aa, artificial
  Synthetic polypeptide
VLSGALCFRMKDSALKVLYLHNNQLLAGGLHAGKVIKGEEISVVPNRWLDASLSPVILGVQGGSQCLSCGVGQEPTLTLEPVNIMELYLGAKESKSFTFYRRDMGLTSSFESAAYPGWFLCTVPEADQPVRLTQLPENGGWNAPITDFYFQQCD

SEQ ID NO: 5 - protein, 153 aa, artificial
  Synthetic polypeptide
KSEMPQPVSIQDINHRVWVLQDQILIAVPRKDRVSPVTISLISCRHVETLEKDRGNPIYLGLNGLNLCLMCAKAGDQPTLQLKEKDIMDLYNQPEPVKSFLFYHSQSGRNSTFESVAFPGWFIAVSSEGGCPLILTQELGKANTTDFGLTMLF

SEQ ID NO: 6 - protein, 153 aa, artificial
  Synthetic polypeptide
WQAAPKSYAIRDSRQMVWVLSGNSLIAAPLSNRVKPVTLHLITCRDTEFSDKKKGNLVYLGIRGKDLCLFCEEIQGKPTLQLKEKNIMDLYMEKKAQKPFLFFHNKEGSSSVFQSVSYPGWFIATSSTSGQPIFLTQERGITNNTNFYLDSVE

SEQ ID NO: 7 - protein, 151 aa, artificial
  Synthetic polypeptide
SMRTPITGTINDLNQQVWTLQGQILVAVPRSDSVTPVTVAVITCKYPEALDQSRGDPIYLGIRNPEMCLCCEEVGGQPTLQLKEQKIMDLYGQPEPVKPFLFYRVKTGRTSTLESVAFPNWFIASSTRDQPIILTSELGKSYNTAFELNIK

SEQ ID NO: 8 - protein, 111 aa, artificial
  Synthetic polypeptide
MHHHHHHHHHHHHMSDSEVNQEAKPEVKPEVKPETHINLKVSDGSSEIFFKIKKTTPLRRLMEAFAKRQGKEMDSLRFLYDGIRIQADQTPEDLDMEDNDIIEAHREQIGG

SEQ ID NO: 9 - protein, 20 aa, artificial
  Synthetic polypeptide
MHHHHHHHHHHHHENLYFQS

SEQ ID NO: 10 - protein, 20 aa, artificial
  Synthetic polypeptide
GGGGSGLNDIFEAQKIEWHE

SEQ ID NO: 11 - protein, 19 aa, artificial
  Synthetic polypeptide
MGWSCIILFLVATATGVHS

SEQ ID NO: 12 - protein, 257 aa, artificial
  Synthetic polypeptide
SGGGGSENLYFQGGGGSEPKSCDKTHTCPPCPAPELLGGPSVFLFPPKPKDTLMISRTPEVTCVVVDVSHEDPEVKFNWYVDGVEVHNAKTKPREEQYNSTYRVVSVLTVLHQDWLNGKEYKCKVSNKALPAPIEKTISKAKGQPREPQVYTLPPSRDELTKNQVSLTCLVKGFYPSDIAVEWESNGQPENNYKTTPPVLDSDGSFFLYSKLTVDKSRWQQGNVFSCSVMHEALHNHYTQKSLSLSPGKDYKDDDDK

SEQ ID NO: 13 - protein, 111 aa, artificial
  Synthetic polypeptide
QSVLTQPPSVSGAPGQRVTISCTGSSSNIGAHYDVHWYQQLPGTAPKLLIYSNNNRPSGVPDRFSGSKSGTSASLAITGLQAEDEADYYCQSYDYSLRGYVFGGGTKLTVL

SEQ ID NO: 14 - protein, 14 aa, artificial
  Synthetic polypeptide
TGSSSNIGAHYDVH

SEQ ID NO: 15 - protein, 7 aa, artificial
  Synthetic polypeptide
SNNNRPS

SEQ ID NO: 16 - protein, 11 aa, artificial
  Synthetic polypeptide
QSYDYSLRGYV

SEQ ID NO: 17 - protein, 111 aa, artificial
  Synthetic polypeptide
QSVLTQPPSVSGAPGQRVTISCTGSSSNIGAHYDVHWYQQLPGTAPKLLIYGNDNRPSGVPDRFSGSKSGTSASLAITGLQAEDEADYYCQSYDYSLSGYVFGGGTKLTVL

SEQ ID NO: 18 - protein, 14 aa, artificial
  Synthetic polypeptide
TGSSSNIGAHYDVH

SEQ ID NO: 19 - protein, 7 aa, artificial
  Synthetic polypeptide
GNDNRPS

SEQ ID NO: 20 - protein, 11 aa, artificial
  Synthetic polypeptide
QSYDYSLSGYV

SEQ ID NO: 21 - protein, 111 aa, artificial
  Synthetic polypeptide
QSVLTQPPSVSGAPGQRVTISCTGSSSNIGAGYDVHWYQQLPGTAPKLLIYGNTNRPSGVPDRFSGSKSGTSASLAITGLQAEDEADYYCQSYDYSLRGYVFGGGTKLTVL

SEQ ID NO: 22 - protein, 14 aa, artificial
  Synthetic polypeptide
TGSSSNIGAGYDVH

SEQ ID NO: 23 - protein, 7 aa, artificial
  Synthetic polypeptide
GNTNRPS

SEQ ID NO: 24 - protein, 11 aa, artificial
  Synthetic polypeptide
QSYDYSLRGYV

SEQ ID NO: 25 - protein, 111 aa, artificial
  Synthetic polypeptide
QSVLTQPPSVSGAPGQRVTISCTGSSSNIGAGYDVHWYQQLPGTAPKLLIYGNRNRPSGVPDRFSGSKSGTSASLAITGLQAEDEADYYCQSYDYSLRVYVFGGGTKLTVL

SEQ ID NO: 26 - protein, 14 aa, artificial
  Synthetic polypeptide
TGSSSNIGAGYDVH

SEQ ID NO: 27 - protein, 7 aa, artificial
  Synthetic polypeptide
GNRNRPS

SEQ ID NO: 28 - protein, 11 aa, artificial
  Synthetic polypeptide
QSYDYSLRVYV

SEQ ID NO: 29 - protein, 111 aa, artificial
  Synthetic polypeptide
QSVLTQPPSVSGAPGQRVTISCTGSSSNIGAHYDVHWYQQLPGTAPKLLIYGNDNRPSGVPDRFSGSKSGTSASLAITGLQAEDEADYYCQSYDYSLKAYVFGGGTKLTVL

SEQ ID NO: 30 - protein, 14 aa, artificial
  Synthetic polypeptide
TGSSSNIGAGYDVH

SEQ ID NO: 31 - protein, 7 aa, artificial
  Synthetic polypeptide
GNDNRPS

SEQ ID NO: 32 - protein, 11 aa, artificial
  Synthetic polypeptide
QSYDYSLKAYV

SEQ ID NO: 33 - protein, 111 aa, artificial
  Synthetic polypeptide
QSVLTQPPSVSGAPGQRVTISCTGSSSNIGAGYDVHWYQQLPGTAPKLLIYGNTNRPSGVPDRFSGSKSGTSASLAITGLQAEDEADYYCQSYDISLSGWVFGGGTKLTVL

SEQ ID NO: 34 - protein, 14 aa, artificial
  Synthetic polypeptide
TGSSSNIGAGYDVH

SEQ ID NO: 35 - protein, 7 aa, artificial
  Synthetic polypeptide
GNTNRPS

SEQ ID NO: 36 - protein, 11 aa, artificial
  Synthetic polypeptide
QSYDISLSGWV

SEQ ID NO: 37 - protein, 108 aa, artificial
  Synthetic polypeptide
EIVLTQSPGTLSLSPGERATLSCRASQSVSSNYLAWYQQKPGQAPKLLIYSASSLQSGVPSRFSGSGSGTDFTLTISSLQPEDFATYYCQQTYSYPPTFGQGTKVEIK

SEQ ID NO: 38 - protein, 12 aa, artificial
  Synthetic polypeptide
RASQSVSSNYLA

SEQ ID NO: 39 - protein, 7 aa, artificial
  Synthetic polypeptide
SASSLQS

SEQ ID NO: 40 - protein, 9 aa, artificial
  Synthetic polypeptide
QQTYSYPPT

SEQ ID NO: 41 - protein, 107 aa, artificial
  Synthetic polypeptide
DIQMTQSPSSLSASVGDRVTITCRASQTIYKYLNWYQQKPGKAPKLLIYAASSLQSGVPSRFSGSGSGTDFTLTISSLQPEDFATYYCQQYSSIPYTFGQGTKVEIK

SEQ ID NO: 42 - protein, 11 aa, artificial
  Synthetic polypeptide
RASQTIYKYLN

SEQ ID NO: 43 - protein, 7 aa, artificial
  Synthetic polypeptide
AASSLQS

SEQ ID NO: 44 - protein, 9 aa, artificial
  Synthetic polypeptide
QQYSSIPYT

SEQ ID NO: 45 - protein, 120 aa, artificial
  Synthetic polypeptide
QVQLVESGGGVVQPGRSLRLSCAASGFSFSAYAMHWVRQAPGKGLEWVAVISYDGTNEYYADSVKGRFTISRDNSKNTLYLQMNSLRAEDTAVYYCARGIRIFTSYFDSWGQGTLVTVSS

SEQ ID NO: 46 - protein, 7 aa, artificial
  Synthetic polypeptide
SAYAMHW

SEQ ID NO: 47 - protein, 13 aa, artificial
  Synthetic polypeptide
VISYDGTNEYYAD

SEQ ID NO: 48 - protein, 13 aa, artificial
  Synthetic polypeptide
ARGIRIFTSYFDS

SEQ ID NO: 49 - protein, 123 aa, artificial
  Synthetic polypeptide
QLQLQESGPGLVKPSETLSLTCTVSGGSISTSSYYWGWIRQPPGKGLEWIGSIYYTGNTYYNPSLKSRVTISVDTSKNQFSLKLSSVTAADTAVYYCARVRYGVGVPRYFDPWGQGTLVTVSS

SEQ ID NO: 50 - protein, 7 aa, artificial
  Synthetic polypeptide
STSSYYW

SEQ ID NO: 51 - protein, 12 aa, artificial
  Synthetic polypeptide
SIYYTGNTYYNP

SEQ ID NO: 52 - protein, 15 aa, artificial
  Synthetic polypeptide
ARVRYGVGVPRYFDP

SEQ ID NO: 53 - protein, 123 aa, artificial
  Synthetic polypeptide
QLQLQESGPGLVKPSETLSLTCTVSGGSISSTSYYWGWIRQPPGKGLEWIGSIHYSGNTYYNPSLKSRVTISVDTSKNQFSLKLSSVTAADTAVYYCARVHYGGYIPRRFDHWGQGTLVTVSS

SEQ ID NO: 54 - protein, 7 aa, artificial
  Synthetic polypeptide
SSTSYYW

SEQ ID NO: 55 - protein, 12 aa, artificial
  Synthetic polypeptide
SIHYSGNTYYNP

SEQ ID NO: 56 - protein, 15 aa, artificial
  Synthetic polypeptide
ARVHYGGYIPRRFDH

SEQ ID NO: 57 - protein, 121 aa, artificial
  Synthetic polypeptide
QLQLQESGPGLVKPSETLSLTCTVSGGSIGSRSYYWGWIRQPPGKGLEWIGSIHYSGTTYYNPSLKSRVTISVDTSKNQFSLKLSSVTAADTAVYYCARVAPSYPRVFDYWGQGTLVTVSS

SEQ ID NO: 58 - protein, 7 aa, artificial
  Synthetic polypeptide
GSRSYYW

SEQ ID NO: 59 - protein, 12 aa, artificial
  Synthetic polypeptide
SIHYSGTTYYNP

SEQ ID NO: 60 - protein, 13 aa, artificial
  Synthetic polypeptide
ARVAPSYPRVFDY

SEQ ID NO: 61 - protein, 122 aa, artificial
  Synthetic polypeptide
EVQLLESGGGLVQPGGSLRLSCAASGFTFSTYAMSWVRQAPGKGLEWVSGISGGSGYTYYADSVKGRFTISRDNSKNTLYLQMNSLRAEDTAVYYCARVVTYRDPPASFDYWGQGTLVTVSS

SEQ ID NO: 62 - protein, 6 aa, artificial
  Synthetic polypeptide
STYAMS

SEQ ID NO: 63 - protein, 13 aa, artificial
  Synthetic polypeptide
GISGGSGYTYYAD

SEQ ID NO: 64 - protein, 15 aa, artificial
  Synthetic polypeptide
ARVVTYRDPPASFDY

SEQ ID NO: 65 - protein, 122 aa, artificial
  Synthetic polypeptide
QLQLQESGPGLVKPSETLSLTCTVSGGSITSSNYYWGWIRQPPGKGLEWIGSIDYTGSTYYNPSLKSRVTISVDTSKNQFSLKLSSVTAADTAVYYCARGKYYETYLGFDVWGQGTLVTVSS

SEQ ID NO: 66 - protein, 7 aa, artificial
  Synthetic polypeptide
TSSNYYW

SEQ ID NO: 67 - protein, 12 aa, artificial
  Synthetic polypeptide
SIDYTGSTYYNP

SEQ ID NO: 68 - protein, 14 aa, artificial
  Synthetic polypeptide
ARGKYYETYLGFDV

SEQ ID NO: 69 - protein, 125 aa, artificial
  Synthetic polypeptide
QVQLVESGGGVVQPGRSLRLSCAASGFTFSSYGMHWVRQAPGKGLEWVAVISYGGSERYYADSVKGRFTISRDNSKNTLYLQMNSLRAEDTAVYYCAREPWYSSRGWTGYGFDVWGQGTLVTVSS

SEQ ID NO: 70 - protein, 6 aa, artificial
  Synthetic polypeptide
SSYGMH

SEQ ID NO: 71 - protein, 13 aa, artificial
  Synthetic polypeptide
VISYGGSERYYAD

SEQ ID NO: 72 - protein, 18 aa, artificial
  Synthetic polypeptide
AREPWYSSRGWTGYGFDV

SEQ ID NO: 73 - protein, 120 aa, artificial
  Synthetic polypeptide
QVQLVQSGAEVKKPGSSVKVSCKASGGTFSNYAISWVRQAPGQGLEWMGGILPILGTVDYAQKFQGRVTITADESTSTAYMELSSLRSEDTAVYYCAREPWYRLGAFDVWGQGTLVTVSS

SEQ ID NO: 74 - protein, 6 aa, artificial
  Synthetic polypeptide
SNYAIS

SEQ ID NO: 75 - protein, 13 aa, artificial
  Synthetic polypeptide
GILPILGTVDYAQ

SEQ ID NO: 76 - protein, 13 aa, artificial
  Synthetic polypeptide
AREPWYRLGAFDV

SEQ ID NO: 77 - protein, 111 aa, artificial
  Synthetic polypeptide
ESVLTQPPSVSGAPGQRVTISCTGSSSNIGAHYDVHWYQQLPGTAPKLLIYGNDNRPSGVPDRFSGSKSGTSASLAITGLQAEDEADYYCQSYDYSLSGYVFGGGTKLTVL

SEQ ID NO: 78 - protein, 111 aa, artificial
  Synthetic polypeptide
ESVLTQPPSVSGAPGQRVTISCTGSSSNIGAGYDVHWYQQLPGTAPKLLIYGNTNRPSGVPDRFSGSKSGTSASLAITGLQAEDEADYYCQSYDISLSGWVFGGGTKLTVL

SEQ ID NO: 79 - protein, 123 aa, artificial
  Synthetic polypeptide
ELQLQESGPGLVKPSETLSLTCTVSGGSISTSSYYWGWIRQPPGKGLEWIGSIYYTGNTYYNPSLKSRVTISVDTSKNQFSLKLSSVTAADTAVYYCARVRYGVGVPRYFDPWGQGTLVTVSS

SEQ ID NO: 80 - protein, 122 aa, artificial
  Synthetic polypeptide
ELQLQESGPGLVKPSETLSLTCTVSGGSITSSNYYWGWIRQPPGKGLEWIGSIDYTGSTYYNPSLKSRVTISVDTSKNQFSLKLSSVTAADTAVYYCARGKYYETYLGFDVWGQGTLVTVSS

SEQ ID NO: 81 - protein, 122 aa, artificial
  Synthetic polypeptide
ELQLQESGPGLVKPSETLSLTCTVSGGSITSTNYYWGWIRQPPGKGLEWIGNIDYTGSTYYNASLKSRVTISVDTSKNQFSLKLSSVTAADTAVYYCATGKYYETYLGFDVWGQGTLVTVSS

SEQ ID NO: 82 - protein, 7 aa, artificial
  Synthetic polypeptide
TSTNYYW

SEQ ID NO: 83 - protein, 12 aa, artificial
  Synthetic polypeptide
NIDYTGSTYYNA

SEQ ID NO: 84 - protein, 14 aa, artificial
  Synthetic polypeptide
ATGKYYETYLGFDV

SEQ ID NO: 85 - protein, 122 aa, artificial
  Synthetic polypeptide
ELQLQESGPGLVKPSETLSLTCTVSGGSITSSNAYWGWIRQPPGKGLEWIGSIDYTGSTAYNPSLKSRVTISVDTSKNQFSLKLSSVTAADTAVYYCAHGKYYETYLGFDVWGQGTLVTVSS

SEQ ID NO: 86 - protein, 7 aa, artificial
  Synthetic polypeptide
TSSNAYW

SEQ ID NO: 87 - protein, 12 aa, artificial
  Synthetic polypeptide
SIDYTGSTAYNP

SEQ ID NO: 88 - protein, 14 aa, artificial
  Synthetic polypeptide
AHGKYYETYLGFDV

SEQ ID NO: 89 - protein, 122 aa, artificial
  Synthetic polypeptide
ELQLQESGPGLVKPSETLSLTCTVSGGSITASNYYWGWIRQPPGKGLEWIGSIDYTGSTYYNTSLKSRVTISVDTSKNQFSLKLSSVTAADTAVYYCATGKYYETYLGFDVWGQGTLVTVSS

SEQ ID NO: 90 - protein, 7 aa, artificial
  Synthetic polypeptide
TASNYYW

SEQ ID NO: 91 - protein, 12 aa, artificial
  Synthetic polypeptide
SIDYTGSTYYNT

SEQ ID NO: 92 - protein, 14 aa, artificial
  Synthetic polypeptide
ATGKYYETYLGFDV

SEQ ID NO: 93 - protein, 122 aa, artificial
  Synthetic polypeptide
ELQLQESGPGLVKPSETLSLTCTVSGGSITASNYYWGWIRQPPGKGLEWIGSIDYTGSTYYNPSLKSRVTISVDTSKNQFSLKLSSVTAADTAVYYCATGKYYETYLGFDVWGQGTLVTVSS

SEQ ID NO: 94 - protein, 7 aa, artificial
  Synthetic polypeptide
TASNYYW

SEQ ID NO: 95 - protein, 12 aa, artificial
  Synthetic polypeptide
SIDYTGSTYYNP

SEQ ID NO: 96 - protein, 14 aa, artificial
  Synthetic polypeptide
ATGKYYETYLGFDV

SEQ ID NO: 97 - protein, 122 aa, artificial
  Synthetic polypeptide
ELQLQESGPGLVKPSETLSLTCTVSGGSITASNYYWGWIRQPPGKGLEWIGSIDYTGSTYYEPSLKSRVTISVDTSKNQFSLKLSSVTAADTAVYYCATGSYYETYLGFDVWGQGTLVTVSS

SEQ ID NO: 98 - protein, 7 aa, artificial
  Synthetic polypeptide
TASNYYW

SEQ ID NO: 99 - protein, 12 aa, artificial
  Synthetic polypeptide
SIDYTGSTYYEP

SEQ ID NO: 100 - protein, 14 aa, artificial
  Synthetic polypeptide
ATGSYYETYLGFDV

SEQ ID NO: 101 - protein, 122 aa, artificial
  Synthetic polypeptide
ELQLQESGPGLVKPSETLSLTCTVSGGSITASNYYWGWIRQPPGKGLEWIGSIDYTGSTYYEPSLKSRVTISVDTSKNQFSLKLSSVTAADTAVYYCATGNYYETYLGFDVWGQGTLVTVSS

SEQ ID NO: 102 - protein, 7 aa, artificial
  Synthetic polypeptide
TASNYYW

SEQ ID NO: 103 - protein, 12 aa, artificial
  Synthetic polypeptide
SIDYTGSTYYEP

SEQ ID NO: 104 - protein, 14 aa, artificial
  Synthetic polypeptide
ATGNYYETYLGFDV

SEQ ID NO: 105 - protein, 122 aa, artificial
  Synthetic polypeptide
ELQLQESGPGLVKPSETLSLTCTVSGGSITASNTYWGWIRQPPGKGLEWIGSIDYTGSTYYNPSLKSRVTISVDTSKNQFSLKLSSVTAADTAVYYCATGKYYETYLGFDVWGQGTLVTVSS

SEQ ID NO: 106 - protein, 7 aa, artificial
  Synthetic polypeptide
TASNTYW

SEQ ID NO: 107 - protein, 12 aa, artificial
  Synthetic polypeptide
SIDYTGSTYYNP

SEQ ID NO: 108 - protein, 14 aa, artificial
  Synthetic polypeptide
ATGKYYETYLGFDV

SEQ ID NO: 109 - protein, 122 aa, artificial
  Synthetic polypeptide
ELQLQESGPGLVKPSETLSLTCTVSGGSITASNYYWGWIRQPPGKGLEWIGSIDYTGSTYYNPSLKSRVTISVDTSKNQFSLKLSSVTAADTAVYYCASGKYYETYLGFDVWGQGTLVTVSS

SEQ ID NO: 110 - protein, 7 aa, artificial
  Synthetic polypeptide
TASNYYW

SEQ ID NO: 111 - protein, 12 aa, artificial
  Synthetic polypeptide
SIDYTGSTYYNP

SEQ ID NO: 112 - protein, 14 aa, artificial
  Synthetic polypeptide
ASGKYYETYLGFDV

SEQ ID NO: 113 - protein, 122 aa, artificial
  Synthetic polypeptide
ELQLQESGPGLVKPSETLSLTCTVSGGSITSSNYYWGWIRQPPGKGLEWIGSIDYTGSTYYNPSLKSRVTISVDTSKNQFSLKLSSVTAADTAVYYCATGKYYETYLGFDVWGQGTLVTVSS

SEQ ID NO: 114 - protein, 7 aa, artificial
  Synthetic polypeptide
TSSNYYW

SEQ ID NO: 115 - protein, 12 aa, artificial
  Synthetic polypeptide
SIDYTGSTYYNP

SEQ ID NO: 116 - protein, 14 aa, artificial
  Synthetic polypeptide
ATGKYYETYLGFDV

SEQ ID NO: 117 - protein, 122 aa, artificial
  Synthetic polypeptide
ELQLQESGPGLVKPSETLSLTCTVSGGSITSSNYYWGWIRQPPGKGLEWIGSIDYTGSTYYQPSLKSRVTISVDTSKNQFSLKLSSVTAADTAVYYCARGNYYETYLGFDVWGQGTLVTVSS

SEQ ID NO: 118 - protein, 7 aa, artificial
  Synthetic polypeptide
TSSNYYW

SEQ ID NO: 119 - protein, 12 aa, artificial
  Synthetic polypeptide
SIDYTGSTYYQP

SEQ ID NO: 120 - protein, 14 aa, artificial
  Synthetic polypeptide
ARGNYYETYLGFDV

SEQ ID NO: 121 - protein, 123 aa, artificial
  Synthetic polypeptide
ELQLQESGPGLVKPSETLSLTCTVSGGSISDSSYYWGWIRQPPGKGLEWIGSIYYTGNTYYNSSLKSRVTISVDTSKNQFSLKLSSVTAADTAVYYCARVRYGVGVPRYFDPWGQGTLVTVSS

SEQ ID NO: 122 - protein, 7 aa, artificial
  Synthetic polypeptide
SDSSYYW

SEQ ID NO: 123 - protein, 12 aa, artificial
  Synthetic polypeptide
SIYYTGNTYYNS

SEQ ID NO: 124 - protein, 15 aa, artificial
  Synthetic polypeptide
ARVRYGVGVPRYFDP

SEQ ID NO: 125 - protein, 123 aa, artificial
  Synthetic polypeptide
ELQLQESGPGLVKPSETLSLTCTVSGGSISESSYYWGWIRQPPGKGLEWIGSIYYTGNTYYNPSLKSRVTISVDTSKNQFSLKLSSVTAADTAVYYCAGVRYGVGVPRYFDPWGQGTLVTVSS

SEQ ID NO: 126 - protein, 7 aa, artificial
  Synthetic polypeptide
SESSYYW

SEQ ID NO: 127 - protein, 12 aa, artificial
  Synthetic polypeptide
SIYYTGNTYYNP

SEQ ID NO: 128 - protein, 15 aa, artificial
  Synthetic polypeptide
AGVRYGVGVPRYFDP

SEQ ID NO: 129 - protein, 123 aa, artificial
  Synthetic polypeptide
ELQLQESGPGLVKPSETLSLTCTVSGGSISTSSDYWGWIRQPPGKGLEWIGSIYYTGNTYYLPSLKSRVTISVDTSKNQFSLKLSSVTAADTAVYYCSRVRYGVGVPRYFDPWGQGTLVTVSS

SEQ ID NO: 130 - protein, 7 aa, artificial
  Synthetic polypeptide
STSSDYW

SEQ ID NO: 131 - protein, 12 aa, artificial
  Synthetic polypeptide
SIYYTGNTYYLP

SEQ ID NO: 132 - protein, 15 aa, artificial
  Synthetic polypeptide
SRVRYGVGVPRYFDP

SEQ ID NO: 133 - protein, 123 aa, artificial
  Synthetic polypeptide
ELQLQESGPGLVKPSETLSLTCTVSGGSISNSSYYWGWIRQPPGKGLEWIGSIYYTGNTYYLPSLKSRVTISVDTSKNQFSLKLSSVTAADTAVYYCARVRYGVGVPRYFDPWGQGTLVTVSS

SEQ ID NO: 134 - protein, 7 aa, artificial
  Synthetic polypeptide
SNSSYYW

SEQ ID NO: 135 - protein, 12 aa, artificial
  Synthetic polypeptide
SIYYTGNTYYLP

SEQ ID NO: 136 - protein, 15 aa, artificial
  Synthetic polypeptide
ARVRYGVGVPRYFDP

SEQ ID NO: 137 - protein, 123 aa, artificial
  Synthetic polypeptide
ELQLQESGPGLVKPSETLSLTCTVSGGSISESSYYWGWIRQPPGKGLEWIGSIYYTGNTYYLPSLKSRVTISVDTSKNQFSLKLSSVTAADTAVYYCARVRYGVGVPRYFDPWGQGTLVTVSS

SEQ ID NO: 138 - protein, 7 aa, artificial
  Synthetic polypeptide
SESSYYW

SEQ ID NO: 139 - protein, 12 aa, artificial
  Synthetic polypeptide
SIYYTGNTYYLP

SEQ ID NO: 140 - protein, 15 aa, artificial
  Synthetic polypeptide
ARVRYGVGVPRYFDP

SEQ ID NO: 141 - protein, 123 aa, artificial
  Synthetic polypeptide
ELQLQESGPGLVKPSETLSLTCTVSGGSISTSSYHWGWIRQPPGKGLEWIGSIYYTGNTYYMPSLKSRVTISVDTSKNQFSLKLSSVTAADTAVYYCVRVRYGVGVPRYFDPWGQGTLVTVSS

SEQ ID NO: 142 - protein, 7 aa, artificial
  Synthetic polypeptide
STSSYHW

SEQ ID NO: 143 - protein, 12 aa, artificial
  Synthetic polypeptide
SIYYTGNTYYMP

SEQ ID NO: 144 - protein, 15 aa, artificial
  Synthetic polypeptide
VRVRYGVGVPRYFDP

SEQ ID NO: 145 - protein, 123 aa, artificial
  Synthetic polypeptide
ELQLQESGPGLVKPSETLSLTCTVSGGSISRSSYYWGWIRQPPGKGLEWIGSIYYTGNTYYWPSLKSRVTISVDTSKNQFSLKLSSVTAADTAVYYCTRVRYGVGVPRYFDPWGQGTLVTVSS

SEQ ID NO: 146 - protein, 7 aa, artificial
  Synthetic polypeptide
SRSSYYW

SEQ ID NO: 147 - protein, 12 aa, artificial
  Synthetic polypeptide
SIYYTGNTYYWP

SEQ ID NO: 148 - protein, 15 aa, artificial
  Synthetic polypeptide
TRVRYGVGVPRYFDP

SEQ ID NO: 149 - protein, 123 aa, artificial
  Synthetic polypeptide
ELQLQESGPGLVKPSETLSLTCTVSGGSISDSSYYWGWIRQPPGKGLEWIGSIYYTGETYYAPSLKSRVTISVDTSKNQFSLKLSSVTAADTAVYYCARLRYGVGVPRYFDPWGQGTLVTVSS

SEQ ID NO: 150 - protein, 7 aa, artificial
  Synthetic polypeptide
SDSSYYW

SEQ ID NO: 151 - protein, 12 aa, artificial
  Synthetic polypeptide
SIYYTGETYYAP

SEQ ID NO: 152 - protein, 15 aa, artificial
  Synthetic polypeptide
ARLRYGVGVPRYFDP

SEQ ID NO: 153 - protein, 123 aa, artificial
  Synthetic polypeptide
ELQLQESGPGLVKPSETLSLTCTVSGGSISDSSYYWGWIRQPPGKGLEWIGSIYYTGETYYAPSLKSRVTISVDTSKNQFSLKLSSVTAADTAVYYCARVKYGVGVPRYFDPWGQGTLVTVSS

SEQ ID NO: 154 - protein, 7 aa, artificial
  Synthetic polypeptide
SDSSYYW

SEQ ID NO: 155 - protein, 12 aa, artificial
  Synthetic polypeptide
SIYYTGETYYAP

SEQ ID NO: 156 - protein, 15 aa, artificial
  Synthetic polypeptide
ARVKYGVGVPRYFDP

SEQ ID NO: 157 - protein, 123 aa, artificial
  Synthetic polypeptide
ELQLQESGPGLVKPSETLSLTCTVSGGSISDSSYYWGWIRQPPGKGLEWIGSIYYTGETYYAPSLKSRVTISVDTSKNQFSLKLSSVTAADTAVYYCARVRYGVGVPRHFDPWGQGTLVTVSS

SEQ ID NO: 158 - protein, 7 aa, artificial
  Synthetic polypeptide
SDSSYYW

SEQ ID NO: 159 - protein, 12 aa, artificial
  Synthetic polypeptide
SIYYTGETYYAP

SEQ ID NO: 160 - protein, 15 aa, artificial
  Synthetic polypeptide
ARVRYGVGVPRHFDP

SEQ ID NO: 161 - protein, 123 aa, artificial
  Synthetic polypeptide
ELQLQESGPGLVKPSETLSLTCTVSGGSISESSYYWGWIRQPPGKGLEWIGSIYYTGETYYAPSLKSRVTISVDTSKNQFSLKLSSVTAADTAVYYCARLRYGVGVPRYFDPWGQGTLVTVSS

SEQ ID NO: 162 - protein, 7 aa, artificial
  Synthetic polypeptide
SESSYYW

SEQ ID NO: 163 - protein, 12 aa, artificial
  Synthetic polypeptide
SIYYTGETYYAP

SEQ ID NO: 164 - protein, 15 aa, artificial
  Synthetic polypeptide
ARLRYGVGVPRYFDP

SEQ ID NO: 165 - protein, 123 aa, artificial
  Synthetic polypeptide
ELQLQESGPGLVKPSETLSLTCTVSGGSISESSYYWGWIRQPPGKGLEWIGSIYYTGETYYAPSLKSRVTISVDTSKNQFSLKLSSVTAADTAVYYCARVKYGVGVPRYFDPWGQGTLVTVSS

SEQ ID NO: 166 - protein, 7 aa, artificial
  Synthetic polypeptide
SESSYYW

SEQ ID NO: 167 - protein, 12 aa, artificial
  Synthetic polypeptide
SIYYTGETYYAP

SEQ ID NO: 168 - protein, 15 aa, artificial
  Synthetic polypeptide
ARVKYGVGVPRYFDP

SEQ ID NO: 169 - protein, 217 aa, artificial
  Synthetic polypeptide
ESVLTQPPSVSGAPGQRVTISCTGSSSNIGAHYDVHWYQQLPGTAPKLLIYGNDNRPSGVPDRFSGSKSGTSASLAITGLQAEDEADYYCQSYDYSLSGYVFGGGTKLTVLGQPKAAPSVTLFPPSSEELQANKATLVCLISDFYPGAVTVAWKADSSPVKAGVETTTPSKQSNNKYAASSYLSLTPEQWKSHKSYSCQVTHEGSTVEKTVAPTECS

SEQ ID NO: 170 - protein, 451 aa, artificial
  Synthetic polypeptide
ELQLQESGPGLVKPSETLSLTCTVSGGSITSSNYYWGWIRQPPGKGLEWIGSIDYTGSTYYNPSLKSRVTISVDTSKNQFSLKLSSVTAADTAVYYCARGKYYETYLGFDVWGQGTLVTVSSASTKGPSVFPLAPSSKSTSGGTAALGCLVKDYFPEPVTVSWNSGALTSGVHTFPAVLQSSGLYSLSSVVTVPSSSLGTQTYICNVNHKPSNTKVDKKVEPKSCDKTHTCPPCPAPELLGGPSVFLFPPKPKDTLMISRTPEVTCVVVDVSHEDPEVKFNWYVDGVEVHNAKTKPREEQYGSTYRVVSVLTVLHQDWLNGKEYKCKVSNKALPAPIEKTISKAKGQPREPQVYTLPPSRDELTKNQVSLTCLVKGFYPSDIAVEWESNGQPENNYKTTPPVLDSDGSFFLYSKLTVDKSRWQQGNVFSCSVMHEALHNHYTQKSLSLSPG

SEQ ID NO: 171 - protein, 451 aa, artificial
  Synthetic polypeptide
ELQLQESGPGLVKPSETLSLTCTVSGGSITSSNYYWGWIRQPPGKGLEWIGSIDYTGSTYYNPSLKSRVTISVDTSKNQFSLKLSSVTAADTAVYYCARGKYYETYLGFDVWGQGTLVTVSSASTKGPSVFPLAPSSKSTSGGTAALGCLVKDYFPEPVTVSWNSGALTSGVHTFPAVLQSSGLYSLSSVVTVPSSSLGTQTYICNVNHKPSNTKVDKKVEPKSCDKTHTCPPCPAPELLGGPSVFLFPPKPKDTLMISRTPEVTCVVVDVSHEDPEVKFNWYVDGVEVHNAKTKPREEQYGSTYRVVSVLTVLHQDWLNGKEYKCKVSNKALPAPIEKTISKAKGQPREPQVYTLPPSRDELTKNQVSLWCLVKGFYPSDIAVEWESNGQPENNYKTTPPVLDSDGSFFLYSKLTVDKSRWQQGNVFSCSVMHEALHNHYTQKSLSLSPG

SEQ ID NO: 172 - protein, 451 aa, artificial
  Synthetic polypeptide
ELQLQESGPGLVKPSETLSLTCTVSGGSITSSNYYWGWIRQPPGKGLEWIGSIDYTGSTYYNPSLKSRVTISVDTSKNQFSLKLSSVTAADTAVYYCARGKYYETYLGFDVWGQGTLVTVSSASTKGPSVFPLAPSSKSTSGGTAALGCLVKDYFPEPVTVSWNSGALTSGVHTFPAVLQSSGLYSLSSVVTVPSSSLGTQTYICNVNHKPSNTKVDKKVEPKSCDKTHTCPPCPAPELLGGPSVFLFPPKPKDTLMISRTPEVTCVVVDVSHEDPEVKFNWYVDGVEVHNAKTKPREEQYGSTYRVVSVLTVLHQDWLNGKEYKCKVSNKALPAPIEKTISKAKGQPREPQVYTLPPSRDELTKNQVSLSCAVKGFYPSDIAVEWESNGQPENNYKTTPPVLDSDGSFFLVSKLTVDKSRWQQGNVFSCSVMHEALHNHYTQKSLSLSPG

SEQ ID NO: 173 - protein, 451 aa, artificial
  Synthetic polypeptide
ELQLQESGPGLVKPSETLSLTCTVSGGSITSTNYYWGWIRQPPGKGLEWIGNIDYTGSTYYNASLKSRVTISVDTSKNQFSLKLSSVTAADTAVYYCATGKYYETYLGFDVWGQGTLVTVSSASTKGPSVFPLAPSSKSTSGGTAALGCLVKDYFPEPVTVSWNSGALTSGVHTFPAVLQSSGLYSLSSVVTVPSSSLGTQTYICNVNHKPSNTKVDKKVEPKSCDKTHTCPPCPAPELLGGPSVFLFPPKPKDTLMISRTPEVTCVVVDVSHEDPEVKFNWYVDGVEVHNAKTKPREEQYGSTYRVVSVLTVLHQDWLNGKEYKCKVSNKALPAPIEKTISKAKGQPREPQVYTLPPSRDELTKNQVSLTCLVKGFYPSDIAVEWESNGQPENNYKTTPPVLDSDGSFFLYSKLTVDKSRWQQGNVFSCSVMHEALHNHYTQKSLSLSPG

SEQ ID NO: 174 - protein, 451 aa, artificial
  Synthetic polypeptide
ELQLQESGPGLVKPSETLSLTCTVSGGSITSTNYYWGWIRQPPGKGLEWIGNIDYTGSTYYNASLKSRVTISVDTSKNQFSLKLSSVTAADTAVYYCATGKYYETYLGFDVWGQGTLVTVSSASTKGPSVFPLAPSSKSTSGGTAALGCLVKDYFPEPVTVSWNSGALTSGVHTFPAVLQSSGLYSLSSVVTVPSSSLGTQTYICNVNHKPSNTKVDKKVEPKSCDKTHTCPPCPAPELLGGPSVFLFPPKPKDTLMISRTPEVTCVVVDVSHEDPEVKFNWYVDGVEVHNAKTKPREEQYGSTYRVVSVLTVLHQDWLNGKEYKCKVSNKALPAPIEKTISKAKGQPREPQVYTLPPSRDELTKNQVSLWCLVKGFYPSDIAVEWESNGQPENNYKTTPPVLDSDGSFFLYSKLTVDKSRWQQGNVFSCSVMHEALHNHYTQKSLSLSPG

SEQ ID NO: 175 - protein, 451 aa, artificial
  Synthetic polypeptide
ELQLQESGPGLVKPSETLSLTCTVSGGSITSTNYYWGWIRQPPGKGLEWIGNIDYTGSTYYNASLKSRVTISVDTSKNQFSLKLSSVTAADTAVYYCATGKYYETYLGFDVWGQGTLVTVSSASTKGPSVFPLAPSSKSTSGGTAALGCLVKDYFPEPVTVSWNSGALTSGVHTFPAVLQSSGLYSLSSVVTVPSSSLGTQTYICNVNHKPSNTKVDKKVEPKSCDKTHTCPPCPAPELLGGPSVFLFPPKPKDTLMISRTPEVTCVVVDVSHEDPEVKFNWYVDGVEVHNAKTKPREEQYGSTYRVVSVLTVLHQDWLNGKEYKCKVSNKALPAPIEKTISKAKGQPREPQVYTLPPSRDELTKNQVSLSCAVKGFYPSDIAVEWESNGQPENNYKTTPPVLDSDGSFFLVSKLTVDKSRWQQGNVFSCSVMHEALHNHYTQKSLSLSPG

SEQ ID NO: 176 - protein, 451 aa, artificial
  Synthetic polypeptide
ELQLQESGPGLVKPSETLSLTCTVSGGSITSSNAYWGWIRQPPGKGLEWIGSIDYTGSTAYNPSLKSRVTISVDTSKNQFSLKLSSVTAADTAVYYCAHGKYYETYLGFDVWGQGTLVTVSSASTKGPSVFPLAPSSKSTSGGTAALGCLVKDYFPEPVTVSWNSGALTSGVHTFPAVLQSSGLYSLSSVVTVPSSSLGTQTYICNVNHKPSNTKVDKKVEPKSCDKTHTCPPCPAPELLGGPSVFLFPPKPKDTLMISRTPEVTCVVVDVSHEDPEVKFNWYVDGVEVHNAKTKPREEQYGSTYRVVSVLTVLHQDWLNGKEYKCKVSNKALPAPIEKTISKAKGQPREPQVYTLPPSRDELTKNQVSLTCLVKGFYPSDIAVEWESNGQPENNYKTTPPVLDSDGSFFLYSKLTVDKSRWQQGNVFSCSVMHEALHNHYTQKSLSLSPG

SEQ ID NO: 177 - protein, 451 aa, artificial
  Synthetic polypeptide
ELQLQESGPGLVKPSETLSLTCTVSGGSITSSNAYWGWIRQPPGKGLEWIGSIDYTGSTAYNPSLKSRVTISVDTSKNQFSLKLSSVTAADTAVYYCAHGKYYETYLGFDVWGQGTLVTVSSASTKGPSVFPLAPSSKSTSGGTAALGCLVKDYFPEPVTVSWNSGALTSGVHTFPAVLQSSGLYSLSSVVTVPSSSLGTQTYICNVNHKPSNTKVDKKVEPKSCDKTHTCPPCPAPELLGGPSVFLFPPKPKDTLMISRTPEVTCVVVDVSHEDPEVKFNWYVDGVEVHNAKTKPREEQYGSTYRVVSVLTVLHQDWLNGKEYKCKVSNKALPAPIEKTISKAKGQPREPQVYTLPPSRDELTKNQVSLWCLVKGFYPSDIAVEWESNGQPENNYKTTPPVLDSDGSFFLYSKLTVDKSRWQQGNVFSCSVMHEALHNHYTQKSLSLSPG

SEQ ID NO: 178 - protein, 451 aa, artificial
  Synthetic polypeptide
ELQLQESGPGLVKPSETLSLTCTVSGGSITSSNAYWGWIRQPPGKGLEWIGSIDYTGSTAYNPSLKSRVTISVDTSKNQFSLKLSSVTAADTAVYYCAHGKYYETYLGFDVWGQGTLVTVSSASTKGPSVFPLAPSSKSTSGGTAALGCLVKDYFPEPVTVSWNSGALTSGVHTFPAVLQSSGLYSLSSVVTVPSSSLGTQTYICNVNHKPSNTKVDKKVEPKSCDKTHTCPPCPAPELLGGPSVFLFPPKPKDTLMISRTPEVTCVVVDVSHEDPEVKFNWYVDGVEVHNAKTKPREEQYGSTYRVVSVLTVLHQDWLNGKEYKCKVSNKALPAPIEKTISKAKGQPREPQVYTLPPSRDELTKNQVSLSCAVKGFYPSDIAVEWESNGQPENNYKTTPPVLDSDGSFFLVSKLTVDKSRWQQGNVFSCSVMHEALHNHYTQKSLSLSPG

SEQ ID NO: 179 - protein, 451 aa, artificial
  Synthetic polypeptide
ELQLQESGPGLVKPSETLSLTCTVSGGSITASNYYWGWIRQPPGKGLEWIGSIDYTGSTYYNTSLKSRVTISVDTSKNQFSLKLSSVTAADTAVYYCATGKYYETYLGFDVWGQGTLVTVSSASTKGPSVFPLAPSSKSTSGGTAALGCLVKDYFPEPVTVSWNSGALTSGVHTFPAVLQSSGLYSLSSVVTVPSSSLGTQTYICNVNHKPSNTKVDKKVEPKSCDKTHTCPPCPAPELLGGPSVFLFPPKPKDTLMISRTPEVTCVVVDVSHEDPEVKFNWYVDGVEVHNAKTKPREEQYGSTYRVVSVLTVLHQDWLNGKEYKCKVSNKALPAPIEKTISKAKGQPREPQVYTLPPSRDELTKNQVSLTCLVKGFYPSDIAVEWESNGQPENNYKTTPPVLDSDGSFFLYSKLTVDKSRWQQGNVFSCSVMHEALHNHYTQKSLSLSPG

SEQ ID NO: 180 - protein, 451 aa, artificial
  Synthetic polypeptide
ELQLQESGPGLVKPSETLSLTCTVSGGSITASNYYWGWIRQPPGKGLEWIGSIDYTGSTYYNTSLKSRVTISVDTSKNQFSLKLSSVTAADTAVYYCATGKYYETYLGFDVWGQGTLVTVSSASTKGPSVFPLAPSSKSTSGGTAALGCLVKDYFPEPVTVSWNSGALTSGVHTFPAVLQSSGLYSLSSVVTVPSSSLGTQTYICNVNHKPSNTKVDKKVEPKSCDKTHTCPPCPAPELLGGPSVFLFPPKPKDTLMISRTPEVTCVVVDVSHEDPEVKFNWYVDGVEVHNAKTKPREEQYGSTYRVVSVLTVLHQDWLNGKEYKCKVSNKALPAPIEKTISKAKGQPREPQVYTLPPSRDELTKNQVSLWCLVKGFYPSDIAVEWESNGQPENNYKTTPPVLDSDGSFFLYSKLTVDKSRWQQGNVFSCSVMHEALHNHYTQKSLSLSPG

SEQ ID NO: 181 - protein, 451 aa, artificial
  Synthetic polypeptide
ELQLQESGPGLVKPSETLSLTCTVSGGSITASNYYWGWIRQPPGKGLEWIGSIDYTGSTYYNTSLKSRVTISVDTSKNQFSLKLSSVTAADTAVYYCATGKYYETYLGFDVWGQGTLVTVSSASTKGPSVFPLAPSSKSTSGGTAALGCLVKDYFPEPVTVSWNSGALTSGVHTFPAVLQSSGLYSLSSVVTVPSSSLGTQTYICNVNHKPSNTKVDKKVEPKSCDKTHTCPPCPAPELLGGPSVFLFPPKPKDTLMISRTPEVTCVVVDVSHEDPEVKFNWYVDGVEVHNAKTKPREEQYGSTYRVVSVLTVLHQDWLNGKEYKCKVSNKALPAPIEKTISKAKGQPREPQVYTLPPSRDELTKNQVSLSCAVKGFYPSDIAVEWESNGQPENNYKTTPPVLDSDGSFFLVSKLTVDKSRWQQGNVFSCSVMHEALHNHYTQKSLSLSPG

SEQ ID NO: 182 - protein, 451 aa, artificial
  Synthetic polypeptide
ELQLQESGPGLVKPSETLSLTCTVSGGSITASNYYWGWIRQPPGKGLEWIGSIDYTGSTYYNPSLKSRVTISVDTSKNQFSLKLSSVTAADTAVYYCATGKYYETYLGFDVWGQGTLVTVSSASTKGPSVFPLAPSSKSTSGGTAALGCLVKDYFPEPVTVSWNSGALTSGVHTFPAVLQSSGLYSLSSVVTVPSSSLGTQTYICNVNHKPSNTKVDKKVEPKSCDKTHTCPPCPAPELLGGPSVFLFPPKPKDTLMISRTPEVTCVVVDVSHEDPEVKFNWYVDGVEVHNAKTKPREEQYGSTYRVVSVLTVLHQDWLNGKEYKCKVSNKALPAPIEKTISKAKGQPREPQVYTLPPSRDELTKNQVSLTCLVKGFYPSDIAVEWESNGQPENNYKTTPPVLDSDGSFFLYSKLTVDKSRWQQGNVFSCSVMHEALHNHYTQKSLSLSPG

SEQ ID NO: 183 - protein, 451 aa, artificial
  Synthetic polypeptide
ELQLQESGPGLVKPSETLSLTCTVSGGSITASNYYWGWIRQPPGKGLEWIGSIDYTGSTYYNPSLKSRVTISVDTSKNQFSLKLSSVTAADTAVYYCATGKYYETYLGFDVWGQGTLVTVSSASTKGPSVFPLAPSSKSTSGGTAALGCLVKDYFPEPVTVSWNSGALTSGVHTFPAVLQSSGLYSLSSVVTVPSSSLGTQTYICNVNHKPSNTKVDKKVEPKSCDKTHTCPPCPAPELLGGPSVFLFPPKPKDTLMISRTPEVTCVVVDVSHEDPEVKFNWYVDGVEVHNAKTKPREEQYGSTYRVVSVLTVLHQDWLNGKEYKCKVSNKALPAPIEKTISKAKGQPREPQVYTLPPSRDELTKNQVSLWCLVKGFYPSDIAVEWESNGQPENNYKTTPPVLDSDGSFFLYSKLTVDKSRWQQGNVFSCSVMHEALHNHYTQKSLSLSPG

SEQ ID NO: 184 - protein, 451 aa, artificial
  Synthetic polypeptide
ELQLQESGPGLVKPSETLSLTCTVSGGSITASNYYWGWIRQPPGKGLEWIGSIDYTGSTYYNPSLKSRVTISVDTSKNQFSLKLSSVTAADTAVYYCATGKYYETYLGFDVWGQGTLVTVSSASTKGPSVFPLAPSSKSTSGGTAALGCLVKDYFPEPVTVSWNSGALTSGVHTFPAVLQSSGLYSLSSVVTVPSSSLGTQTYICNVNHKPSNTKVDKKVEPKSCDKTHTCPPCPAPELLGGPSVFLFPPKPKDTLMISRTPEVTCVVVDVSHEDPEVKFNWYVDGVEVHNAKTKPREEQYGSTYRVVSVLTVLHQDWLNGKEYKCKVSNKALPAPIEKTISKAKGQPREPQVYTLPPSRDELTKNQVSLSCAVKGFYPSDIAVEWESNGQPENNYKTTPPVLDSDGSFFLVSKLTVDKSRWQQGNVFSCSVMHEALHNHYTQKSLSLSPG

SEQ ID NO: 185 - protein, 451 aa, artificial
  Synthetic polypeptide
ELQLQESGPGLVKPSETLSLTCTVSGGSITASNYYWGWIRQPPGKGLEWIGSIDYTGSTYYEPSLKSRVTISVDTSKNQFSLKLSSVTAADTAVYYCATGSYYETYLGFDVWGQGTLVTVSSASTKGPSVFPLAPSSKSTSGGTAALGCLVKDYFPEPVTVSWNSGALTSGVHTFPAVLQSSGLYSLSSVVTVPSSSLGTQTYICNVNHKPSNTKVDKKVEPKSCDKTHTCPPCPAPELLGGPSVFLFPPKPKDTLMISRTPEVTCVVVDVSHEDPEVKFNWYVDGVEVHNAKTKPREEQYGSTYRVVSVLTVLHQDWLNGKEYKCKVSNKALPAPIEKTISKAKGQPREPQVYTLPPSRDELTKNQVSLTCLVKGFYPSDIAVEWESNGQPENNYKTTPPVLDSDGSFFLYSKLTVDKSRWQQGNVFSCSVMHEALHNHYTQKSLSLSPG

SEQ ID NO: 186 - protein, 451 aa, artificial
  Synthetic polypeptide
ELQLQESGPGLVKPSETLSLTCTVSGGSITASNYYWGWIRQPPGKGLEWIGSIDYTGSTYYEPSLKSRVTISVDTSKNQFSLKLSSVTAADTAVYYCATGSYYETYLGFDVWGQGTLVTVSSASTKGPSVFPLAPSSKSTSGGTAALGCLVKDYFPEPVTVSWNSGALTSGVHTFPAVLQSSGLYSLSSVVTVPSSSLGTQTYICNVNHKPSNTKVDKKVEPKSCDKTHTCPPCPAPELLGGPSVFLFPPKPKDTLMISRTPEVTCVVVDVSHEDPEVKFNWYVDGVEVHNAKTKPREEQYGSTYRVVSVLTVLHQDWLNGKEYKCKVSNKALPAPIEKTISKAKGQPREPQVYTLPPSRDELTKNQVSLWCLVKGFYPSDIAVEWESNGQPENNYKTTPPVLDSDGSFFLYSKLTVDKSRWQQGNVFSCSVMHEALHNHYTQKSLSLSPG

SEQ ID NO: 187 - protein, 451 aa, artificial
  Synthetic polypeptide
ELQLQESGPGLVKPSETLSLTCTVSGGSITASNYYWGWIRQPPGKGLEWIGSIDYTGSTYYEPSLKSRVTISVDTSKNQFSLKLSSVTAADTAVYYCATGSYYETYLGFDVWGQGTLVTVSSASTKGPSVFPLAPSSKSTSGGTAALGCLVKDYFPEPVTVSWNSGALTSGVHTFPAVLQSSGLYSLSSVVTVPSSSLGTQTYICNVNHKPSNTKVDKKVEPKSCDKTHTCPPCPAPELLGGPSVFLFPPKPKDTLMISRTPEVTCVVVDVSHEDPEVKFNWYVDGVEVHNAKTKPREEQYGSTYRVVSVLTVLHQDWLNGKEYKCKVSNKALPAPIEKTISKAKGQPREPQVYTLPPSRDELTKNQVSLSCAVKGFYPSDIAVEWESNGQPENNYKTTPPVLDSDGSFFLVSKLTVDKSRWQQGNVFSCSVMHEALHNHYTQKSLSLSPG

SEQ ID NO: 188 - protein, 451 aa, artificial
  Synthetic polypeptide
ELQLQESGPGLVKPSETLSLTCTVSGGSITASNYYWGWIRQPPGKGLEWIGSIDYTGSTYYEPSLKSRVTISVDTSKNQFSLKLSSVTAADTAVYYCATGNYYETYLGFDVWGQGTLVTVSSASTKGPSVFPLAPSSKSTSGGTAALGCLVKDYFPEPVTVSWNSGALTSGVHTFPAVLQSSGLYSLSSVVTVPSSSLGTQTYICNVNHKPSNTKVDKKVEPKSCDKTHTCPPCPAPELLGGPSVFLFPPKPKDTLMISRTPEVTCVVVDVSHEDPEVKFNWYVDGVEVHNAKTKPREEQYGSTYRVVSVLTVLHQDWLNGKEYKCKVSNKALPAPIEKTISKAKGQPREPQVYTLPPSRDELTKNQVSLTCLVKGFYPSDIAVEWESNGQPENNYKTTPPVLDSDGSFFLYSKLTVDKSRWQQGNVFSCSVMHEALHNHYTQKSLSLSPG

SEQ ID NO: 189 - protein, 451 aa, artificial
  Synthetic polypeptide
ELQLQESGPGLVKPSETLSLTCTVSGGSITASNYYWGWIRQPPGKGLEWIGSIDYTGSTYYEPSLKSRVTISVDTSKNQFSLKLSSVTAADTAVYYCATGNYYETYLGFDVWGQGTLVTVSSASTKGPSVFPLAPSSKSTSGGTAALGCLVKDYFPEPVTVSWNSGALTSGVHTFPAVLQSSGLYSLSSVVTVPSSSLGTQTYICNVNHKPSNTKVDKKVEPKSCDKTHTCPPCPAPELLGGPSVFLFPPKPKDTLMISRTPEVTCVVVDVSHEDPEVKFNWYVDGVEVHNAKTKPREEQYGSTYRVVSVLTVLHQDWLNGKEYKCKVSNKALPAPIEKTISKAKGQPREPQVYTLPPSRDELTKNQVSLWCLVKGFYPSDIAVEWESNGQPENNYKTTPPVLDSDGSFFLYSKLTVDKSRWQQGNVFSCSVMHEALHNHYTQKSLSLSPG

SEQ ID NO: 190 - protein, 451 aa, artificial
  Synthetic polypeptide
ELQLQESGPGLVKPSETLSLTCTVSGGSITASNYYWGWIRQPPGKGLEWIGSIDYTGSTYYEPSLKSRVTISVDTSKNQFSLKLSSVTAADTAVYYCATGNYYETYLGFDVWGQGTLVTVSSASTKGPSVFPLAPSSKSTSGGTAALGCLVKDYFPEPVTVSWNSGALTSGVHTFPAVLQSSGLYSLSSVVTVPSSSLGTQTYICNVNHKPSNTKVDKKVEPKSCDKTHTCPPCPAPELLGGPSVFLFPPKPKDTLMISRTPEVTCVVVDVSHEDPEVKFNWYVDGVEVHNAKTKPREEQYGSTYRVVSVLTVLHQDWLNGKEYKCKVSNKALPAPIEKTISKAKGQPREPQVYTLPPSRDELTKNQVSLSCAVKGFYPSDIAVEWESNGQPENNYKTTPPVLDSDGSFFLVSKLTVDKSRWQQGNVFSCSVMHEALHNHYTQKSLSLSPG

SEQ ID NO: 191 - protein, 451 aa, artificial
  Synthetic polypeptide
ELQLQESGPGLVKPSETLSLTCTVSGGSITASNTYWGWIRQPPGKGLEWIGSIDYTGSTYYNPSLKSRVTISVDTSKNQFSLKLSSVTAADTAVYYCATGKYYETYLGFDVWGQGTLVTVSSASTKGPSVFPLAPSSKSTSGGTAALGCLVKDYFPEPVTVSWNSGALTSGVHTFPAVLQSSGLYSLSSVVTVPSSSLGTQTYICNVNHKPSNTKVDKKVEPKSCDKTHTCPPCPAPELLGGPSVFLFPPKPKDTLMISRTPEVTCVVVDVSHEDPEVKFNWYVDGVEVHNAKTKPREEQYGSTYRVVSVLTVLHQDWLNGKEYKCKVSNKALPAPIEKTISKAKGQPREPQVYTLPPSRDELTKNQVSLTCLVKGFYPSDIAVEWESNGQPENNYKTTPPVLDSDGSFFLYSKLTVDKSRWQQGNVFSCSVMHEALHNHYTQKSLSLSPG

SEQ ID NO: 192 - protein, 451 aa, artificial
  Synthetic polypeptide
ELQLQESGPGLVKPSETLSLTCTVSGGSITASNTYWGWIRQPPGKGLEWIGSIDYTGSTYYNPSLKSRVTISVDTSKNQFSLKLSSVTAADTAVYYCATGKYYETYLGFDVWGQGTLVTVSSASTKGPSVFPLAPSSKSTSGGTAALGCLVKDYFPEPVTVSWNSGALTSGVHTFPAVLQSSGLYSLSSVVTVPSSSLGTQTYICNVNHKPSNTKVDKKVEPKSCDKTHTCPPCPAPELLGGPSVFLFPPKPKDTLMISRTPEVTCVVVDVSHEDPEVKFNWYVDGVEVHNAKTKPREEQYGSTYRVVSVLTVLHQDWLNGKEYKCKVSNKALPAPIEKTISKAKGQPREPQVYTLPPSRDELTKNQVSLWCLVKGFYPSDIAVEWESNGQPENNYKTTPPVLDSDGSFFLYSKLTVDKSRWQQGNVFSCSVMHEALHNHYTQKSLSLSPG

SEQ ID NO: 193 - protein, 451 aa, artificial
  Synthetic polypeptide
ELQLQESGPGLVKPSETLSLTCTVSGGSITASNTYWGWIRQPPGKGLEWIGSIDYTGSTYYNPSLKSRVTISVDTSKNQFSLKLSSVTAADTAVYYCATGKYYETYLGFDVWGQGTLVTVSSASTKGPSVFPLAPSSKSTSGGTAALGCLVKDYFPEPVTVSWNSGALTSGVHTFPAVLQSSGLYSLSSVVTVPSSSLGTQTYICNVNHKPSNTKVDKKVEPKSCDKTHTCPPCPAPELLGGPSVFLFPPKPKDTLMISRTPEVTCVVVDVSHEDPEVKFNWYVDGVEVHNAKTKPREEQYGSTYRVVSVLTVLHQDWLNGKEYKCKVSNKALPAPIEKTISKAKGQPREPQVYTLPPSRDELTKNQVSLSCAVKGFYPSDIAVEWESNGQPENNYKTTPPVLDSDGSFFLVSKLTVDKSRWQQGNVFSCSVMHEALHNHYTQKSLSLSPG

SEQ ID NO: 194 - protein, 451 aa, artificial
  Synthetic polypeptide
ELQLQESGPGLVKPSETLSLTCTVSGGSITASNYYWGWIRQPPGKGLEWIGSIDYTGSTYYNPSLKSRVTISVDTSKNQFSLKLSSVTAADTAVYYCASGKYYETYLGFDVWGQGTLVTVSSASTKGPSVFPLAPSSKSTSGGTAALGCLVKDYFPEPVTVSWNSGALTSGVHTFPAVLQSSGLYSLSSVVTVPSSSLGTQTYICNVNHKPSNTKVDKKVEPKSCDKTHTCPPCPAPELLGGPSVFLFPPKPKDTLMISRTPEVTCVVVDVSHEDPEVKFNWYVDGVEVHNAKTKPREEQYGSTYRVVSVLTVLHQDWLNGKEYKCKVSNKALPAPIEKTISKAKGQPREPQVYTLPPSRDELTKNQVSLTCLVKGFYPSDIAVEWESNGQPENNYKTTPPVLDSDGSFFLYSKLTVDKSRWQQGNVFSCSVMHEALHNHYTQKSLSLSPG

SEQ ID NO: 195 - protein, 451 aa, artificial
  Synthetic polypeptide
ELQLQESGPGLVKPSETLSLTCTVSGGSITASNYYWGWIRQPPGKGLEWIGSIDYTGSTYYNPSLKSRVTISVDTSKNQFSLKLSSVTAADTAVYYCASGKYYETYLGFDVWGQGTLVTVSSASTKGPSVFPLAPSSKSTSGGTAALGCLVKDYFPEPVTVSWNSGALTSGVHTFPAVLQSSGLYSLSSVVTVPSSSLGTQTYICNVNHKPSNTKVDKKVEPKSCDKTHTCPPCPAPELLGGPSVFLFPPKPKDTLMISRTPEVTCVVVDVSHEDPEVKFNWYVDGVEVHNAKTKPREEQYGSTYRVVSVLTVLHQDWLNGKEYKCKVSNKALPAPIEKTISKAKGQPREPQVYTLPPSRDELTKNQVSLWCLVKGFYPSDIAVEWESNGQPENNYKTTPPVLDSDGSFFLYSKLTVDKSRWQQGNVFSCSVMHEALHNHYTQKSLSLSPG

SEQ ID NO: 196 - protein, 451 aa, artificial
  Synthetic polypeptide
ELQLQESGPGLVKPSETLSLTCTVSGGSITASNYYWGWIRQPPGKGLEWIGSIDYTGSTYYNPSLKSRVTISVDTSKNQFSLKLSSVTAADTAVYYCASGKYYETYLGFDVWGQGTLVTVSSASTKGPSVFPLAPSSKSTSGGTAALGCLVKDYFPEPVTVSWNSGALTSGVHTFPAVLQSSGLYSLSSVVTVPSSSLGTQTYICNVNHKPSNTKVDKKVEPKSCDKTHTCPPCPAPELLGGPSVFLFPPKPKDTLMISRTPEVTCVVVDVSHEDPEVKFNWYVDGVEVHNAKTKPREEQYGSTYRVVSVLTVLHQDWLNGKEYKCKVSNKALPAPIEKTISKAKGQPREPQVYTLPPSRDELTKNQVSLSCAVKGFYPSDIAVEWESNGQPENNYKTTPPVLDSDGSFFLVSKLTVDKSRWQQGNVFSCSVMHEALHNHYTQKSLSLSPG

SEQ ID NO: 197 - protein, 451 aa, artificial
  Synthetic polypeptide
ELQLQESGPGLVKPSETLSLTCTVSGGSITSSNYYWGWIRQPPGKGLEWIGSIDYTGSTYYNPSLKSRVTISVDTSKNQFSLKLSSVTAADTAVYYCATGKYYETYLGFDVWGQGTLVTVSSASTKGPSVFPLAPSSKSTSGGTAALGCLVKDYFPEPVTVSWNSGALTSGVHTFPAVLQSSGLYSLSSVVTVPSSSLGTQTYICNVNHKPSNTKVDKKVEPKSCDKTHTCPPCPAPELLGGPSVFLFPPKPKDTLMISRTPEVTCVVVDVSHEDPEVKFNWYVDGVEVHNAKTKPREEQYGSTYRVVSVLTVLHQDWLNGKEYKCKVSNKALPAPIEKTISKAKGQPREPQVYTLPPSRDELTKNQVSLTCLVKGFYPSDIAVEWESNGQPENNYKTTPPVLDSDGSFFLYSKLTVDKSRWQQGNVFSCSVMHEALHNHYTQKSLSLSPG

SEQ ID NO: 198 - protein, 451 aa, artificial
  Synthetic polypeptide
ELQLQESGPGLVKPSETLSLTCTVSGGSITSSNYYWGWIRQPPGKGLEWIGSIDYTGSTYYNPSLKSRVTISVDTSKNQFSLKLSSVTAADTAVYYCATGKYYETYLGFDVWGQGTLVTVSSASTKGPSVFPLAPSSKSTSGGTAALGCLVKDYFPEPVTVSWNSGALTSGVHTFPAVLQSSGLYSLSSVVTVPSSSLGTQTYICNVNHKPSNTKVDKKVEPKSCDKTHTCPPCPAPELLGGPSVFLFPPKPKDTLMISRTPEVTCVVVDVSHEDPEVKFNWYVDGVEVHNAKTKPREEQYGSTYRVVSVLTVLHQDWLNGKEYKCKVSNKALPAPIEKTISKAKGQPREPQVYTLPPSRDELTKNQVSLWCLVKGFYPSDIAVEWESNGQPENNYKTTPPVLDSDGSFFLYSKLTVDKSRWQQGNVFSCSVMHEALHNHYTQKSLSLSPG

SEQ ID NO: 199 - protein, 451 aa, artificial
  Synthetic polypeptide
ELQLQESGPGLVKPSETLSLTCTVSGGSITSSNYYWGWIRQPPGKGLEWIGSIDYTGSTYYNPSLKSRVTISVDTSKNQFSLKLSSVTAADTAVYYCATGKYYETYLGFDVWGQGTLVTVSSASTKGPSVFPLAPSSKSTSGGTAALGCLVKDYFPEPVTVSWNSGALTSGVHTFPAVLQSSGLYSLSSVVTVPSSSLGTQTYICNVNHKPSNTKVDKKVEPKSCDKTHTCPPCPAPELLGGPSVFLFPPKPKDTLMISRTPEVTCVVVDVSHEDPEVKFNWYVDGVEVHNAKTKPREEQYGSTYRVVSVLTVLHQDWLNGKEYKCKVSNKALPAPIEKTISKAKGQPREPQVYTLPPSRDELTKNQVSLSCAVKGFYPSDIAVEWESNGQPENNYKTTPPVLDSDGSFFLVSKLTVDKSRWQQGNVFSCSVMHEALHNHYTQKSLSLSPG

SEQ ID NO: 200 - protein, 451 aa, artificial
  Synthetic polypeptide
ELQLQESGPGLVKPSETLSLTCTVSGGSITSSNYYWGWIRQPPGKGLEWIGSIDYTGSTYYQPSLKSRVTISVDTSKNQFSLKLSSVTAADTAVYYCARGNYYETYLGFDVWGQGTLVTVSSASTKGPSVFPLAPSSKSTSGGTAALGCLVKDYFPEPVTVSWNSGALTSGVHTFPAVLQSSGLYSLSSVVTVPSSSLGTQTYICNVNHKPSNTKVDKKVEPKSCDKTHTCPPCPAPELLGGPSVFLFPPKPKDTLMISRTPEVTCVVVDVSHEDPEVKFNWYVDGVEVHNAKTKPREEQYGSTYRVVSVLTVLHQDWLNGKEYKCKVSNKALPAPIEKTISKAKGQPREPQVYTLPPSRDELTKNQVSLTCLVKGFYPSDIAVEWESNGQPENNYKTTPPVLDSDGSFFLYSKLTVDKSRWQQGNVFSCSVMHEALHNHYTQKSLSLSPG

SEQ ID NO: 201 - protein, 451 aa, artificial
  Synthetic polypeptide
ELQLQESGPGLVKPSETLSLTCTVSGGSITSSNYYWGWIRQPPGKGLEWIGSIDYTGSTYYQPSLKSRVTISVDTSKNQFSLKLSSVTAADTAVYYCARGNYYETYLGFDVWGQGTLVTVSSASTKGPSVFPLAPSSKSTSGGTAALGCLVKDYFPEPVTVSWNSGALTSGVHTFPAVLQSSGLYSLSSVVTVPSSSLGTQTYICNVNHKPSNTKVDKKVEPKSCDKTHTCPPCPAPELLGGPSVFLFPPKPKDTLMISRTPEVTCVVVDVSHEDPEVKFNWYVDGVEVHNAKTKPREEQYGSTYRVVSVLTVLHQDWLNGKEYKCKVSNKALPAPIEKTISKAKGQPREPQVYTLPPSRDELTKNQVSLWCLVKGFYPSDIAVEWESNGQPENNYKTTPPVLDSDGSFFLYSKLTVDKSRWQQGNVFSCSVMHEALHNHYTQKSLSLSPG

SEQ ID NO: 202 - protein, 451 aa, artificial
  Synthetic polypeptide
ELQLQESGPGLVKPSETLSLTCTVSGGSITSSNYYWGWIRQPPGKGLEWIGSIDYTGSTYYQPSLKSRVTISVDTSKNQFSLKLSSVTAADTAVYYCARGNYYETYLGFDVWGQGTLVTVSSASTKGPSVFPLAPSSKSTSGGTAALGCLVKDYFPEPVTVSWNSGALTSGVHTFPAVLQSSGLYSLSSVVTVPSSSLGTQTYICNVNHKPSNTKVDKKVEPKSCDKTHTCPPCPAPELLGGPSVFLFPPKPKDTLMISRTPEVTCVVVDVSHEDPEVKFNWYVDGVEVHNAKTKPREEQYGSTYRVVSVLTVLHQDWLNGKEYKCKVSNKALPAPIEKTISKAKGQPREPQVYTLPPSRDELTKNQVSLSCAVKGFYPSDIAVEWESNGQPENNYKTTPPVLDSDGSFFLVSKLTVDKSRWQQGNVFSCSVMHEALHNHYTQKSLSLSPG

SEQ ID NO: 203 - protein, 452 aa, artificial
  Synthetic polypeptide
ELQLQESGPGLVKPSETLSLTCTVSGGSISTSSYYWGWIRQPPGKGLEWIGSIYYTGNTYYNPSLKSRVTISVDTSKNQFSLKLSSVTAADTAVYYCARVRYGVGVPRYFDPWGQGTLVTVSSASTKGPSVFPLAPSSKSTSGGTAALGCLVKDYFPEPVTVSWNSGALTSGVHTFPAVLQSSGLYSLSSVVTVPSSSLGTQTYICNVNHKPSNTKVDKKVEPKSCDKTHTCPPCPAPELLGGPSVFLFPPKPKDTLMISRTPEVTCVVVDVSHEDPEVKFNWYVDGVEVHNAKTKPREEQYGSTYRVVSVLTVLHQDWLNGKEYKCKVSNKALPAPIEKTISKAKGQPREPQVYTLPPSRDELTKNQVSLTCLVKGFYPSDIAVEWESNGQPENNYKTTPPVLDSDGSFFLYSKLTVDKSRWQQGNVFSCSVMHEALHNHYTQKSLSLSPG

SEQ ID NO: 204 - protein, 452 aa, artificial
  Synthetic polypeptide
ELQLQESGPGLVKPSETLSLTCTVSGGSISTSSYYWGWIRQPPGKGLEWIGSIYYTGNTYYNPSLKSRVTISVDTSKNQFSLKLSSVTAADTAVYYCARVRYGVGVPRYFDPWGQGTLVTVSSASTKGPSVFPLAPSSKSTSGGTAALGCLVKDYFPEPVTVSWNSGALTSGVHTFPAVLQSSGLYSLSSVVTVPSSSLGTQTYICNVNHKPSNTKVDKKVEPKSCDKTHTCPPCPAPELLGGPSVFLFPPKPKDTLMISRTPEVTCVVVDVSHEDPEVKFNWYVDGVEVHNAKTKPREEQYGSTYRVVSVLTVLHQDWLNGKEYKCKVSNKALPAPIEKTISKAKGQPREPQVYTLPPSRDELTKNQVSLWCLVKGFYPSDIAVEWESNGQPENNYKTTPPVLDSDGSFFLYSKLTVDKSRWQQGNVFSCSVMHEALHNHYTQKSLSLSPG

SEQ ID NO: 205 - protein, 452 aa, artificial
  Synthetic polypeptide
ELQLQESGPGLVKPSETLSLTCTVSGGSISTSSYYWGWIRQPPGKGLEWIGSIYYTGNTYYNPSLKSRVTISVDTSKNQFSLKLSSVTAADTAVYYCARVRYGVGVPRYFDPWGQGTLVTVSSASTKGPSVFPLAPSSKSTSGGTAALGCLVKDYFPEPVTVSWNSGALTSGVHTFPAVLQSSGLYSLSSVVTVPSSSLGTQTYICNVNHKPSNTKVDKKVEPKSCDKTHTCPPCPAPELLGGPSVFLFPPKPKDTLMISRTPEVTCVVVDVSHEDPEVKFNWYVDGVEVHNAKTKPREEQYGSTYRVVSVLTVLHQDWLNGKEYKCKVSNKALPAPIEKTISKAKGQPREPQVYTLPPSRDELTKNQVSLSCAVKGFYPSDIAVEWESNGQPENNYKTTPPVLDSDGSFFLVSKLTVDKSRWQQGNVFSCSVMHEALHNHYTQKSLSLSPG

SEQ ID NO: 206 - protein, 452 aa, artificial
  Synthetic polypeptide
ELQLQESGPGLVKPSETLSLTCTVSGGSISDSSYYWGWIRQPPGKGLEWIGSIYYTGNTYYNSSLKSRVTISVDTSKNQFSLKLSSVTAADTAVYYCARVRYGVGVPRYFDPWGQGTLVTVSSASTKGPSVFPLAPSSKSTSGGTAALGCLVKDYFPEPVTVSWNSGALTSGVHTFPAVLQSSGLYSLSSVVTVPSSSLGTQTYICNVNHKPSNTKVDKKVEPKSCDKTHTCPPCPAPELLGGPSVFLFPPKPKDTLMISRTPEVTCVVVDVSHEDPEVKFNWYVDGVEVHNAKTKPREEQYGSTYRVVSVLTVLHQDWLNGKEYKCKVSNKALPAPIEKTISKAKGQPREPQVYTLPPSRDELTKNQVSLTCLVKGFYPSDIAVEWESNGQPENNYKTTPPVLDSDGSFFLYSKLTVDKSRWQQGNVFSCSVMHEALHNHYTQKSLSLSPG

SEQ ID NO: 207 - protein, 452 aa, artificial
  Synthetic polypeptide
ELQLQESGPGLVKPSETLSLTCTVSGGSISDSSYYWGWIRQPPGKGLEWIGSIYYTGNTYYNSSLKSRVTISVDTSKNQFSLKLSSVTAADTAVYYCARVRYGVGVPRYFDPWGQGTLVTVSSASTKGPSVFPLAPSSKSTSGGTAALGCLVKDYFPEPVTVSWNSGALTSGVHTFPAVLQSSGLYSLSSVVTVPSSSLGTQTYICNVNHKPSNTKVDKKVEPKSCDKTHTCPPCPAPELLGGPSVFLFPPKPKDTLMISRTPEVTCVVVDVSHEDPEVKFNWYVDGVEVHNAKTKPREEQYGSTYRVVSVLTVLHQDWLNGKEYKCKVSNKALPAPIEKTISKAKGQPREPQVYTLPPSRDELTKNQVSLWCLVKGFYPSDIAVEWESNGQPENNYKTTPPVLDSDGSFFLYSKLTVDKSRWQQGNVFSCSVMHEALHNHYTQKSLSLSPG

SEQ ID NO: 208 - protein, 452 aa, artificial
  Synthetic polypeptide
ELQLQESGPGLVKPSETLSLTCTVSGGSISDSSYYWGWIRQPPGKGLEWIGSIYYTGNTYYNSSLKSRVTISVDTSKNQFSLKLSSVTAADTAVYYCARVRYGVGVPRYFDPWGQGTLVTVSSASTKGPSVFPLAPSSKSTSGGTAALGCLVKDYFPEPVTVSWNSGALTSGVHTFPAVLQSSGLYSLSSVVTVPSSSLGTQTYICNVNHKPSNTKVDKKVEPKSCDKTHTCPPCPAPELLGGPSVFLFPPKPKDTLMISRTPEVTCVVVDVSHEDPEVKFNWYVDGVEVHNAKTKPREEQYGSTYRVVSVLTVLHQDWLNGKEYKCKVSNKALPAPIEKTISKAKGQPREPQVYTLPPSRDELTKNQVSLSCAVKGFYPSDIAVEWESNGQPENNYKTTPPVLDSDGSFFLVSKLTVDKSRWQQGNVFSCSVMHEALHNHYTQKSLSLSPG

SEQ ID NO: 209 - protein, 452 aa, artificial
  Synthetic polypeptide
ELQLQESGPGLVKPSETLSLTCTVSGGSISESSYYWGWIRQPPGKGLEWIGSIYYTGNTYYNPSLKSRVTISVDTSKNQFSLKLSSVTAADTAVYYCAGVRYGVGVPRYFDPWGQGTLVTVSSASTKGPSVFPLAPSSKSTSGGTAALGCLVKDYFPEPVTVSWNSGALTSGVHTFPAVLQSSGLYSLSSVVTVPSSSLGTQTYICNVNHKPSNTKVDKKVEPKSCDKTHTCPPCPAPELLGGPSVFLFPPKPKDTLMISRTPEVTCVVVDVSHEDPEVKFNWYVDGVEVHNAKTKPREEQYGSTYRVVSVLTVLHQDWLNGKEYKCKVSNKALPAPIEKTISKAKGQPREPQVYTLPPSRDELTKNQVSLTCLVKGFYPSDIAVEWESNGQPENNYKTTPPVLDSDGSFFLYSKLTVDKSRWQQGNVFSCSVMHEALHNHYTQKSLSLSPG

SEQ ID NO: 210 - protein, 452 aa, artificial
  Synthetic polypeptide
ELQLQESGPGLVKPSETLSLTCTVSGGSISESSYYWGWIRQPPGKGLEWIGSIYYTGNTYYNPSLKSRVTISVDTSKNQFSLKLSSVTAADTAVYYCAGVRYGVGVPRYFDPWGQGTLVTVSSASTKGPSVFPLAPSSKSTSGGTAALGCLVKDYFPEPVTVSWNSGALTSGVHTFPAVLQSSGLYSLSSVVTVPSSSLGTQTYICNVNHKPSNTKVDKKVEPKSCDKTHTCPPCPAPELLGGPSVFLFPPKPKDTLMISRTPEVTCVVVDVSHEDPEVKFNWYVDGVEVHNAKTKPREEQYGSTYRVVSVLTVLHQDWLNGKEYKCKVSNKALPAPIEKTISKAKGQPREPQVYTLPPSRDELTKNQVSLWCLVKGFYPSDIAVEWESNGQPENNYKTTPPVLDSDGSFFLYSKLTVDKSRWQQGNVFSCSVMHEALHNHYTQKSLSLSPG

SEQ ID NO: 211 - protein, 452 aa, artificial
  Synthetic polypeptide
ELQLQESGPGLVKPSETLSLTCTVSGGSISESSYYWGWIRQPPGKGLEWIGSIYYTGNTYYNPSLKSRVTISVDTSKNQFSLKLSSVTAADTAVYYCAGVRYGVGVPRYFDPWGQGTLVTVSSASTKGPSVFPLAPSSKSTSGGTAALGCLVKDYFPEPVTVSWNSGALTSGVHTFPAVLQSSGLYSLSSVVTVPSSSLGTQTYICNVNHKPSNTKVDKKVEPKSCDKTHTCPPCPAPELLGGPSVFLFPPKPKDTLMISRTPEVTCVVVDVSHEDPEVKFNWYVDGVEVHNAKTKPREEQYGSTYRVVSVLTVLHQDWLNGKEYKCKVSNKALPAPIEKTISKAKGQPREPQVYTLPPSRDELTKNQVSLSCAVKGFYPSDIAVEWESNGQPENNYKTTPPVLDSDGSFFLVSKLTVDKSRWQQGNVFSCSVMHEALHNHYTQKSLSLSPG

SEQ ID NO: 212 - protein, 452 aa, artificial
  Synthetic polypeptide
ELQLQESGPGLVKPSETLSLTCTVSGGSISTSSDYWGWIRQPPGKGLEWIGSIYYTGNTYYLPSLKSRVTISVDTSKNQFSLKLSSVTAADTAVYYCSRVRYGVGVPRYFDPWGQGTLVTVSSASTKGPSVFPLAPSSKSTSGGTAALGCLVKDYFPEPVTVSWNSGALTSGVHTFPAVLQSSGLYSLSSVVTVPSSSLGTQTYICNVNHKPSNTKVDKKVEPKSCDKTHTCPPCPAPELLGGPSVFLFPPKPKDTLMISRTPEVTCVVVDVSHEDPEVKFNWYVDGVEVHNAKTKPREEQYGSTYRVVSVLTVLHQDWLNGKEYKCKVSNKALPAPIEKTISKAKGQPREPQVYTLPPSRDELTKNQVSLTCLVKGFYPSDIAVEWESNGQPENNYKTTPPVLDSDGSFFLYSKLTVDKSRWQQGNVFSCSVMHEALHNHYTQKSLSLSPG

SEQ ID NO: 213 - protein, 452 aa, artificial
  Synthetic polypeptide
ELQLQESGPGLVKPSETLSLTCTVSGGSISTSSDYWGWIRQPPGKGLEWIGSIYYTGNTYYLPSLKSRVTISVDTSKNQFSLKLSSVTAADTAVYYCSRVRYGVGVPRYFDPWGQGTLVTVSSASTKGPSVFPLAPSSKSTSGGTAALGCLVKDYFPEPVTVSWNSGALTSGVHTFPAVLQSSGLYSLSSVVTVPSSSLGTQTYICNVNHKPSNTKVDKKVEPKSCDKTHTCPPCPAPELLGGPSVFLFPPKPKDTLMISRTPEVTCVVVDVSHEDPEVKFNWYVDGVEVHNAKTKPREEQYGSTYRVVSVLTVLHQDWLNGKEYKCKVSNKALPAPIEKTISKAKGQPREPQVYTLPPSRDELTKNQVSLWCLVKGFYPSDIAVEWESNGQPENNYKTTPPVLDSDGSFFLYSKLTVDKSRWQQGNVFSCSVMHEALHNHYTQKSLSLSPG

SEQ ID NO: 214 - protein, 452 aa, artificial
  Synthetic polypeptide
ELQLQESGPGLVKPSETLSLTCTVSGGSISTSSDYWGWIRQPPGKGLEWIGSIYYTGNTYYLPSLKSRVTISVDTSKNQFSLKLSSVTAADTAVYYCSRVRYGVGVPRYFDPWGQGTLVTVSSASTKGPSVFPLAPSSKSTSGGTAALGCLVKDYFPEPVTVSWNSGALTSGVHTFPAVLQSSGLYSLSSVVTVPSSSLGTQTYICNVNHKPSNTKVDKKVEPKSCDKTHTCPPCPAPELLGGPSVFLFPPKPKDTLMISRTPEVTCVVVDVSHEDPEVKFNWYVDGVEVHNAKTKPREEQYGSTYRVVSVLTVLHQDWLNGKEYKCKVSNKALPAPIEKTISKAKGQPREPQVYTLPPSRDELTKNQVSLSCAVKGFYPSDIAVEWESNGQPENNYKTTPPVLDSDGSFFLVSKLTVDKSRWQQGNVFSCSVMHEALHNHYTQKSLSLSPG

SEQ ID NO: 215 - protein, 452 aa, artificial
  Synthetic polypeptide
ELQLQESGPGLVKPSETLSLTCTVSGGSISNSSYYWGWIRQPPGKGLEWIGSIYYTGNTYYLPSLKSRVTISVDTSKNQFSLKLSSVTAADTAVYYCARVRYGVGVPRYFDPWGQGTLVTVSSASTKGPSVFPLAPSSKSTSGGTAALGCLVKDYFPEPVTVSWNSGALTSGVHTFPAVLQSSGLYSLSSVVTVPSSSLGTQTYICNVNHKPSNTKVDKKVEPKSCDKTHTCPPCPAPELLGGPSVFLFPPKPKDTLMISRTPEVTCVVVDVSHEDPEVKFNWYVDGVEVHNAKTKPREEQYGSTYRVVSVLTVLHQDWLNGKEYKCKVSNKALPAPIEKTISKAKGQPREPQVYTLPPSRDELTKNQVSLTCLVKGFYPSDIAVEWESNGQPENNYKTTPPVLDSDGSFFLYSKLTVDKSRWQQGNVFSCSVMHEALHNHYTQKSLSLSPG

SEQ ID NO: 216 - protein, 452 aa, artificial
  Synthetic polypeptide
ELQLQESGPGLVKPSETLSLTCTVSGGSISNSSYYWGWIRQPPGKGLEWIGSIYYTGNTYYLPSLKSRVTISVDTSKNQFSLKLSSVTAADTAVYYCARVRYGVGVPRYFDPWGQGTLVTVSSASTKGPSVFPLAPSSKSTSGGTAALGCLVKDYFPEPVTVSWNSGALTSGVHTFPAVLQSSGLYSLSSVVTVPSSSLGTQTYICNVNHKPSNTKVDKKVEPKSCDKTHTCPPCPAPELLGGPSVFLFPPKPKDTLMISRTPEVTCVVVDVSHEDPEVKFNWYVDGVEVHNAKTKPREEQYGSTYRVVSVLTVLHQDWLNGKEYKCKVSNKALPAPIEKTISKAKGQPREPQVYTLPPSRDELTKNQVSLWCLVKGFYPSDIAVEWESNGQPENNYKTTPPVLDSDGSFFLYSKLTVDKSRWQQGNVFSCSVMHEALHNHYTQKSLSLSPG

SEQ ID NO: 217 - protein, 452 aa, artificial
  Synthetic polypeptide
ELQLQESGPGLVKPSETLSLTCTVSGGSISNSSYYWGWIRQPPGKGLEWIGSIYYTGNTYYLPSLKSRVTISVDTSKNQFSLKLSSVTAADTAVYYCARVRYGVGVPRYFDPWGQGTLVTVSSASTKGPSVFPLAPSSKSTSGGTAALGCLVKDYFPEPVTVSWNSGALTSGVHTFPAVLQSSGLYSLSSVVTVPSSSLGTQTYICNVNHKPSNTKVDKKVEPKSCDKTHTCPPCPAPELLGGPSVFLFPPKPKDTLMISRTPEVTCVVVDVSHEDPEVKFNWYVDGVEVHNAKTKPREEQYGSTYRVVSVLTVLHQDWLNGKEYKCKVSNKALPAPIEKTISKAKGQPREPQVYTLPPSRDELTKNQVSLSCAVKGFYPSDIAVEWESNGQPENNYKTTPPVLDSDGSFFLVSKLTVDKSRWQQGNVFSCSVMHEALHNHYTQKSLSLSPG

SEQ ID NO: 218 - protein, 452 aa, artificial
  Synthetic polypeptide
ELQLQESGPGLVKPSETLSLTCTVSGGSISESSYYWGWIRQPPGKGLEWIGSIYYTGNTYYLPSLKSRVTISVDTSKNQFSLKLSSVTAADTAVYYCARVRYGVGVPRYFDPWGQGTLVTVSSASTKGPSVFPLAPSSKSTSGGTAALGCLVKDYFPEPVTVSWNSGALTSGVHTFPAVLQSSGLYSLSSVVTVPSSSLGTQTYICNVNHKPSNTKVDKKVEPKSCDKTHTCPPCPAPELLGGPSVFLFPPKPKDTLMISRTPEVTCVVVDVSHEDPEVKFNWYVDGVEVHNAKTKPREEQYGSTYRVVSVLTVLHQDWLNGKEYKCKVSNKALPAPIEKTISKAKGQPREPQVYTLPPSRDELTKNQVSLTCLVKGFYPSDIAVEWESNGQPENNYKTTPPVLDSDGSFFLYSKLTVDKSRWQQGNVFSCSVMHEALHNHYTQKSLSLSPG

SEQ ID NO: 219 - protein, 452 aa, artificial
  Synthetic polypeptide
ELQLQESGPGLVKPSETLSLTCTVSGGSISESSYYWGWIRQPPGKGLEWIGSIYYTGNTYYLPSLKSRVTISVDTSKNQFSLKLSSVTAADTAVYYCARVRYGVGVPRYFDPWGQGTLVTVSSASTKGPSVFPLAPSSKSTSGGTAALGCLVKDYFPEPVTVSWNSGALTSGVHTFPAVLQSSGLYSLSSVVTVPSSSLGTQTYICNVNHKPSNTKVDKKVEPKSCDKTHTCPPCPAPELLGGPSVFLFPPKPKDTLMISRTPEVTCVVVDVSHEDPEVKFNWYVDGVEVHNAKTKPREEQYGSTYRVVSVLTVLHQDWLNGKEYKCKVSNKALPAPIEKTISKAKGQPREPQVYTLPPSRDELTKNQVSLWCLVKGFYPSDIAVEWESNGQPENNYKTTPPVLDSDGSFFLYSKLTVDKSRWQQGNVFSCSVMHEALHNHYTQKSLSLSPG

SEQ ID NO: 220 - protein, 452 aa, artificial
  Synthetic polypeptide
ELQLQESGPGLVKPSETLSLTCTVSGGSISESSYYWGWIRQPPGKGLEWIGSIYYTGNTYYLPSLKSRVTISVDTSKNQFSLKLSSVTAADTAVYYCARVRYGVGVPRYFDPWGQGTLVTVSSASTKGPSVFPLAPSSKSTSGGTAALGCLVKDYFPEPVTVSWNSGALTSGVHTFPAVLQSSGLYSLSSVVTVPSSSLGTQTYICNVNHKPSNTKVDKKVEPKSCDKTHTCPPCPAPELLGGPSVFLFPPKPKDTLMISRTPEVTCVVVDVSHEDPEVKFNWYVDGVEVHNAKTKPREEQYGSTYRVVSVLTVLHQDWLNGKEYKCKVSNKALPAPIEKTISKAKGQPREPQVYTLPPSRDELTKNQVSLSCAVKGFYPSDIAVEWESNGQPENNYKTTPPVLDSDGSFFLVSKLTVDKSRWQQGNVFSCSVMHEALHNHYTQKSLSLSPG

SEQ ID NO: 221 - protein, 452 aa, artificial
  Synthetic polypeptide
ELQLQESGPGLVKPSETLSLTCTVSGGSISTSSYHWGWIRQPPGKGLEWIGSIYYTGNTYYMPSLKSRVTISVDTSKNQFSLKLSSVTAADTAVYYCVRVRYGVGVPRYFDPWGQGTLVTVSSASTKGPSVFPLAPSSKSTSGGTAALGCLVKDYFPEPVTVSWNSGALTSGVHTFPAVLQSSGLYSLSSVVTVPSSSLGTQTYICNVNHKPSNTKVDKKVEPKSCDKTHTCPPCPAPELLGGPSVFLFPPKPKDTLMISRTPEVTCVVVDVSHEDPEVKFNWYVDGVEVHNAKTKPREEQYGSTYRVVSVLTVLHQDWLNGKEYKCKVSNKALPAPIEKTISKAKGQPREPQVYTLPPSRDELTKNQVSLTCLVKGFYPSDIAVEWESNGQPENNYKTTPPVLDSDGSFFLYSKLTVDKSRWQQGNVFSCSVMHEALHNHYTQKSLSLSPG

SEQ ID NO: 222 - protein, 452 aa, artificial
  Synthetic polypeptide
ELQLQESGPGLVKPSETLSLTCTVSGGSISTSSYHWGWIRQPPGKGLEWIGSIYYTGNTYYMPSLKSRVTISVDTSKNQFSLKLSSVTAADTAVYYCVRVRYGVGVPRYFDPWGQGTLVTVSSASTKGPSVFPLAPSSKSTSGGTAALGCLVKDYFPEPVTVSWNSGALTSGVHTFPAVLQSSGLYSLSSVVTVPSSSLGTQTYICNVNHKPSNTKVDKKVEPKSCDKTHTCPPCPAPELLGGPSVFLFPPKPKDTLMISRTPEVTCVVVDVSHEDPEVKFNWYVDGVEVHNAKTKPREEQYGSTYRVVSVLTVLHQDWLNGKEYKCKVSNKALPAPIEKTISKAKGQPREPQVYTLPPSRDELTKNQVSLWCLVKGFYPSDIAVEWESNGQPENNYKTTPPVLDSDGSFFLYSKLTVDKSRWQQGNVFSCSVMHEALHNHYTQKSLSLSPG

SEQ ID NO: 223 - protein, 452 aa, artificial
  Synthetic polypeptide
ELQLQESGPGLVKPSETLSLTCTVSGGSISTSSYHWGWIRQPPGKGLEWIGSIYYTGNTYYMPSLKSRVTISVDTSKNQFSLKLSSVTAADTAVYYCVRVRYGVGVPRYFDPWGQGTLVTVSSASTKGPSVFPLAPSSKSTSGGTAALGCLVKDYFPEPVTVSWNSGALTSGVHTFPAVLQSSGLYSLSSVVTVPSSSLGTQTYICNVNHKPSNTKVDKKVEPKSCDKTHTCPPCPAPELLGGPSVFLFPPKPKDTLMISRTPEVTCVVVDVSHEDPEVKFNWYVDGVEVHNAKTKPREEQYGSTYRVVSVLTVLHQDWLNGKEYKCKVSNKALPAPIEKTISKAKGQPREPQVYTLPPSRDELTKNQVSLSCAVKGFYPSDIAVEWESNGQPENNYKTTPPVLDSDGSFFLVSKLTVDKSRWQQGNVFSCSVMHEALHNHYTQKSLSLSPG

SEQ ID NO: 224 - protein, 452 aa, artificial
  Synthetic polypeptide
ELQLQESGPGLVKPSETLSLTCTVSGGSISRSSYYWGWIRQPPGKGLEWIGSIYYTGNTYYWPSLKSRVTISVDTSKNQFSLKLSSVTAADTAVYYCTRVRYGVGVPRYFDPWGQGTLVTVSSASTKGPSVFPLAPSSKSTSGGTAALGCLVKDYFPEPVTVSWNSGALTSGVHTFPAVLQSSGLYSLSSVVTVPSSSLGTQTYICNVNHKPSNTKVDKKVEPKSCDKTHTCPPCPAPELLGGPSVFLFPPKPKDTLMISRTPEVTCVVVDVSHEDPEVKFNWYVDGVEVHNAKTKPREEQYGSTYRVVSVLTVLHQDWLNGKEYKCKVSNKALPAPIEKTISKAKGQPREPQVYTLPPSRDELTKNQVSLTCLVKGFYPSDIAVEWESNGQPENNYKTTPPVLDSDGSFFLYSKLTVDKSRWQQGNVFSCSVMHEALHNHYTQKSLSLSPG

SEQ ID NO: 225 - protein, 452 aa, artificial
  Synthetic polypeptide
ELQLQESGPGLVKPSETLSLTCTVSGGSISRSSYYWGWIRQPPGKGLEWIGSIYYTGNTYYWPSLKSRVTISVDTSKNQFSLKLSSVTAADTAVYYCTRVRYGVGVPRYFDPWGQGTLVTVSSASTKGPSVFPLAPSSKSTSGGTAALGCLVKDYFPEPVTVSWNSGALTSGVHTFPAVLQSSGLYSLSSVVTVPSSSLGTQTYICNVNHKPSNTKVDKKVEPKSCDKTHTCPPCPAPELLGGPSVFLFPPKPKDTLMISRTPEVTCVVVDVSHEDPEVKFNWYVDGVEVHNAKTKPREEQYGSTYRVVSVLTVLHQDWLNGKEYKCKVSNKALPAPIEKTISKAKGQPREPQVYTLPPSRDELTKNQVSLWCLVKGFYPSDIAVEWESNGQPENNYKTTPPVLDSDGSFFLYSKLTVDKSRWQQGNVFSCSVMHEALHNHYTQKSLSLSPG

SEQ ID NO: 226 - protein, 452 aa, artificial
  Synthetic polypeptide
ELQLQESGPGLVKPSETLSLTCTVSGGSISRSSYYWGWIRQPPGKGLEWIGSIYYTGNTYYWPSLKSRVTISVDTSKNQFSLKLSSVTAADTAVYYCTRVRYGVGVPRYFDPWGQGTLVTVSSASTKGPSVFPLAPSSKSTSGGTAALGCLVKDYFPEPVTVSWNSGALTSGVHTFPAVLQSSGLYSLSSVVTVPSSSLGTQTYICNVNHKPSNTKVDKKVEPKSCDKTHTCPPCPAPELLGGPSVFLFPPKPKDTLMISRTPEVTCVVVDVSHEDPEVKFNWYVDGVEVHNAKTKPREEQYGSTYRVVSVLTVLHQDWLNGKEYKCKVSNKALPAPIEKTISKAKGQPREPQVYTLPPSRDELTKNQVSLSCAVKGFYPSDIAVEWESNGQPENNYKTTPPVLDSDGSFFLVSKLTVDKSRWQQGNVFSCSVMHEALHNHYTQKSLSLSPG

SEQ ID NO: 227 - protein, 452 aa, artificial
  Synthetic polypeptide
ELQLQESGPGLVKPSETLSLTCTVSGGSISDSSYYWGWIRQPPGKGLEWIGSIYYTGETYYAPSLKSRVTISVDTSKNQFSLKLSSVTAADTAVYYCARLRYGVGVPRYFDPWGQGTLVTVSSASTKGPSVFPLAPSSKSTSGGTAALGCLVKDYFPEPVTVSWNSGALTSGVHTFPAVLQSSGLYSLSSVVTVPSSSLGTQTYICNVNHKPSNTKVDKKVEPKSCDKTHTCPPCPAPELLGGPSVFLFPPKPKDTLMISRTPEVTCVVVDVSHEDPEVKFNWYVDGVEVHNAKTKPREEQYGSTYRVVSVLTVLHQDWLNGKEYKCKVSNKALPAPIEKTISKAKGQPREPQVYTLPPSRDELTKNQVSLTCLVKGFYPSDIAVEWESNGQPENNYKTTPPVLDSDGSFFLYSKLTVDKSRWQQGNVFSCSVMHEALHNHYTQKSLSLSPG

SEQ ID NO: 228 - protein, 452 aa, artificial
  Synthetic polypeptide
ELQLQESGPGLVKPSETLSLTCTVSGGSISDSSYYWGWIRQPPGKGLEWIGSIYYTGETYYAPSLKSRVTISVDTSKNQFSLKLSSVTAADTAVYYCARLRYGVGVPRYFDPWGQGTLVTVSSASTKGPSVFPLAPSSKSTSGGTAALGCLVKDYFPEPVTVSWNSGALTSGVHTFPAVLQSSGLYSLSSVVTVPSSSLGTQTYICNVNHKPSNTKVDKKVEPKSCDKTHTCPPCPAPELLGGPSVFLFPPKPKDTLMISRTPEVTCVVVDVSHEDPEVKFNWYVDGVEVHNAKTKPREEQYGSTYRVVSVLTVLHQDWLNGKEYKCKVSNKALPAPIEKTISKAKGQPREPQVYTLPPSRDELTKNQVSLWCLVKGFYPSDIAVEWESNGQPENNYKTTPPVLDSDGSFFLYSKLTVDKSRWQQGNVFSCSVMHEALHNHYTQKSLSLSPG

SEQ ID NO: 229 - protein, 452 aa, artificial
  Synthetic polypeptide
ELQLQESGPGLVKPSETLSLTCTVSGGSISDSSYYWGWIRQPPGKGLEWIGSIYYTGETYYAPSLKSRVTISVDTSKNQFSLKLSSVTAADTAVYYCARLRYGVGVPRYFDPWGQGTLVTVSSASTKGPSVFPLAPSSKSTSGGTAALGCLVKDYFPEPVTVSWNSGALTSGVHTFPAVLQSSGLYSLSSVVTVPSSSLGTQTYICNVNHKPSNTKVDKKVEPKSCDKTHTCPPCPAPELLGGPSVFLFPPKPKDTLMISRTPEVTCVVVDVSHEDPEVKFNWYVDGVEVHNAKTKPREEQYGSTYRVVSVLTVLHQDWLNGKEYKCKVSNKALPAPIEKTISKAKGQPREPQVYTLPPSRDELTKNQVSLSCAVKGFYPSDIAVEWESNGQPENNYKTTPPVLDSDGSFFLVSKLTVDKSRWQQGNVFSCSVMHEALHNHYTQKSLSLSPG

SEQ ID NO: 230 - protein, 452 aa, artificial
  Synthetic polypeptide
ELQLQESGPGLVKPSETLSLTCTVSGGSISDSSYYWGWIRQPPGKGLEWIGSIYYTGETYYAPSLKSRVTISVDTSKNQFSLKLSSVTAADTAVYYCARVKYGVGVPRYFDPWGQGTLVTVSSASTKGPSVFPLAPSSKSTSGGTAALGCLVKDYFPEPVTVSWNSGALTSGVHTFPAVLQSSGLYSLSSVVTVPSSSLGTQTYICNVNHKPSNTKVDKKVEPKSCDKTHTCPPCPAPELLGGPSVFLFPPKPKDTLMISRTPEVTCVVVDVSHEDPEVKFNWYVDGVEVHNAKTKPREEQYGSTYRVVSVLTVLHQDWLNGKEYKCKVSNKALPAPIEKTISKAKGQPREPQVYTLPPSRDELTKNQVSLTCLVKGFYPSDIAVEWESNGQPENNYKTTPPVLDSDGSFFLYSKLTVDKSRWQQGNVFSCSVMHEALHNHYTQKSLSLSPG

SEQ ID NO: 231 - protein, 452 aa, artificial
  Synthetic polypeptide
ELQLQESGPGLVKPSETLSLTCTVSGGSISDSSYYWGWIRQPPGKGLEWIGSIYYTGETYYAPSLKSRVTISVDTSKNQFSLKLSSVTAADTAVYYCARVKYGVGVPRYFDPWGQGTLVTVSSASTKGPSVFPLAPSSKSTSGGTAALGCLVKDYFPEPVTVSWNSGALTSGVHTFPAVLQSSGLYSLSSVVTVPSSSLGTQTYICNVNHKPSNTKVDKKVEPKSCDKTHTCPPCPAPELLGGPSVFLFPPKPKDTLMISRTPEVTCVVVDVSHEDPEVKFNWYVDGVEVHNAKTKPREEQYGSTYRVVSVLTVLHQDWLNGKEYKCKVSNKALPAPIEKTISKAKGQPREPQVYTLPPSRDELTKNQVSLWCLVKGFYPSDIAVEWESNGQPENNYKTTPPVLDSDGSFFLYSKLTVDKSRWQQGNVFSCSVMHEALHNHYTQKSLSLSPG

SEQ ID NO: 232 - protein, 452 aa, artificial
  Synthetic polypeptide
ELQLQESGPGLVKPSETLSLTCTVSGGSISDSSYYWGWIRQPPGKGLEWIGSIYYTGETYYAPSLKSRVTISVDTSKNQFSLKLSSVTAADTAVYYCARVKYGVGVPRYFDPWGQGTLVTVSSASTKGPSVFPLAPSSKSTSGGTAALGCLVKDYFPEPVTVSWNSGALTSGVHTFPAVLQSSGLYSLSSVVTVPSSSLGTQTYICNVNHKPSNTKVDKKVEPKSCDKTHTCPPCPAPELLGGPSVFLFPPKPKDTLMISRTPEVTCVVVDVSHEDPEVKFNWYVDGVEVHNAKTKPREEQYGSTYRVVSVLTVLHQDWLNGKEYKCKVSNKALPAPIEKTISKAKGQPREPQVYTLPPSRDELTKNQVSLSCAVKGFYPSDIAVEWESNGQPENNYKTTPPVLDSDGSFFLVSKLTVDKSRWQQGNVFSCSVMHEALHNHYTQKSLSLSPG

SEQ ID NO: 233 - protein, 452 aa, artificial
  Synthetic polypeptide
ELQLQESGPGLVKPSETLSLTCTVSGGSISDSSYYWGWIRQPPGKGLEWIGSIYYTGETYYAPSLKSRVTISVDTSKNQFSLKLSSVTAADTAVYYCARVRYGVGVPRHFDPWGQGTLVTVSSASTKGPSVFPLAPSSKSTSGGTAALGCLVKDYFPEPVTVSWNSGALTSGVHTFPAVLQSSGLYSLSSVVTVPSSSLGTQTYICNVNHKPSNTKVDKKVEPKSCDKTHTCPPCPAPELLGGPSVFLFPPKPKDTLMISRTPEVTCVVVDVSHEDPEVKFNWYVDGVEVHNAKTKPREEQYGSTYRVVSVLTVLHQDWLNGKEYKCKVSNKALPAPIEKTISKAKGQPREPQVYTLPPSRDELTKNQVSLTCLVKGFYPSDIAVEWESNGQPENNYKTTPPVLDSDGSFFLYSKLTVDKSRWQQGNVFSCSVMHEALHNHYTQKSLSLSPG

SEQ ID NO: 234 - protein, 452 aa, artificial
  Synthetic polypeptide
ELQLQESGPGLVKPSETLSLTCTVSGGSISDSSYYWGWIRQPPGKGLEWIGSIYYTGETYYAPSLKSRVTISVDTSKNQFSLKLSSVTAADTAVYYCARVRYGVGVPRHFDPWGQGTLVTVSSASTKGPSVFPLAPSSKSTSGGTAALGCLVKDYFPEPVTVSWNSGALTSGVHTFPAVLQSSGLYSLSSVVTVPSSSLGTQTYICNVNHKPSNTKVDKKVEPKSCDKTHTCPPCPAPELLGGPSVFLFPPKPKDTLMISRTPEVTCVVVDVSHEDPEVKFNWYVDGVEVHNAKTKPREEQYGSTYRVVSVLTVLHQDWLNGKEYKCKVSNKALPAPIEKTISKAKGQPREPQVYTLPPSRDELTKNQVSLWCLVKGFYPSDIAVEWESNGQPENNYKTTPPVLDSDGSFFLYSKLTVDKSRWQQGNVFSCSVMHEALHNHYTQKSLSLSPG

SEQ ID NO: 235 - protein, 452 aa, artificial
  Synthetic polypeptide
ELQLQESGPGLVKPSETLSLTCTVSGGSISDSSYYWGWIRQPPGKGLEWIGSIYYTGETYYAPSLKSRVTISVDTSKNQFSLKLSSVTAADTAVYYCARVRYGVGVPRHFDPWGQGTLVTVSSASTKGPSVFPLAPSSKSTSGGTAALGCLVKDYFPEPVTVSWNSGALTSGVHTFPAVLQSSGLYSLSSVVTVPSSSLGTQTYICNVNHKPSNTKVDKKVEPKSCDKTHTCPPCPAPELLGGPSVFLFPPKPKDTLMISRTPEVTCVVVDVSHEDPEVKFNWYVDGVEVHNAKTKPREEQYGSTYRVVSVLTVLHQDWLNGKEYKCKVSNKALPAPIEKTISKAKGQPREPQVYTLPPSRDELTKNQVSLSCAVKGFYPSDIAVEWESNGQPENNYKTTPPVLDSDGSFFLVSKLTVDKSRWQQGNVFSCSVMHEALHNHYTQKSLSLSPG

SEQ ID NO: 236 - protein, 452 aa, artificial
  Synthetic polypeptide
ELQLQESGPGLVKPSETLSLTCTVSGGSISESSYYWGWIRQPPGKGLEWIGSIYYTGETYYAPSLKSRVTISVDTSKNQFSLKLSSVTAADTAVYYCARLRYGVGVPRYFDPWGQGTLVTVSSASTKGPSVFPLAPSSKSTSGGTAALGCLVKDYFPEPVTVSWNSGALTSGVHTFPAVLQSSGLYSLSSVVTVPSSSLGTQTYICNVNHKPSNTKVDKKVEPKSCDKTHTCPPCPAPELLGGPSVFLFPPKPKDTLMISRTPEVTCVVVDVSHEDPEVKFNWYVDGVEVHNAKTKPREEQYGSTYRVVSVLTVLHQDWLNGKEYKCKVSNKALPAPIEKTISKAKGQPREPQVYTLPPSRDELTKNQVSLTCLVKGFYPSDIAVEWESNGQPENNYKTTPPVLDSDGSFFLYSKLTVDKSRWQQGNVFSCSVMHEALHNHYTQKSLSLSPG

SEQ ID NO: 237 - protein, 452 aa, artificial
  Synthetic polypeptide
ELQLQESGPGLVKPSETLSLTCTVSGGSISESSYYWGWIRQPPGKGLEWIGSIYYTGETYYAPSLKSRVTISVDTSKNQFSLKLSSVTAADTAVYYCARLRYGVGVPRYFDPWGQGTLVTVSSASTKGPSVFPLAPSSKSTSGGTAALGCLVKDYFPEPVTVSWNSGALTSGVHTFPAVLQSSGLYSLSSVVTVPSSSLGTQTYICNVNHKPSNTKVDKKVEPKSCDKTHTCPPCPAPELLGGPSVFLFPPKPKDTLMISRTPEVTCVVVDVSHEDPEVKFNWYVDGVEVHNAKTKPREEQYGSTYRVVSVLTVLHQDWLNGKEYKCKVSNKALPAPIEKTISKAKGQPREPQVYTLPPSRDELTKNQVSLWCLVKGFYPSDIAVEWESNGQPENNYKTTPPVLDSDGSFFLYSKLTVDKSRWQQGNVFSCSVMHEALHNHYTQKSLSLSPG

SEQ ID NO: 238 - protein, 452 aa, artificial
  Synthetic polypeptide
ELQLQESGPGLVKPSETLSLTCTVSGGSISESSYYWGWIRQPPGKGLEWIGSIYYTGETYYAPSLKSRVTISVDTSKNQFSLKLSSVTAADTAVYYCARLRYGVGVPRYFDPWGQGTLVTVSSASTKGPSVFPLAPSSKSTSGGTAALGCLVKDYFPEPVTVSWNSGALTSGVHTFPAVLQSSGLYSLSSVVTVPSSSLGTQTYICNVNHKPSNTKVDKKVEPKSCDKTHTCPPCPAPELLGGPSVFLFPPKPKDTLMISRTPEVTCVVVDVSHEDPEVKFNWYVDGVEVHNAKTKPREEQYGSTYRVVSVLTVLHQDWLNGKEYKCKVSNKALPAPIEKTISKAKGQPREPQVYTLPPSRDELTKNQVSLSCAVKGFYPSDIAVEWESNGQPENNYKTTPPVLDSDGSFFLVSKLTVDKSRWQQGNVFSCSVMHEALHNHYTQKSLSLSPG

SEQ ID NO: 239 - protein, 452 aa, artificial
  Synthetic polypeptide
ELQLQESGPGLVKPSETLSLTCTVSGGSISESSYYWGWIRQPPGKGLEWIGSIYYTGETYYAPSLKSRVTISVDTSKNQFSLKLSSVTAADTAVYYCARVKYGVGVPRYFDPWGQGTLVTVSSASTKGPSVFPLAPSSKSTSGGTAALGCLVKDYFPEPVTVSWNSGALTSGVHTFPAVLQSSGLYSLSSVVTVPSSSLGTQTYICNVNHKPSNTKVDKKVEPKSCDKTHTCPPCPAPELLGGPSVFLFPPKPKDTLMISRTPEVTCVVVDVSHEDPEVKFNWYVDGVEVHNAKTKPREEQYGSTYRVVSVLTVLHQDWLNGKEYKCKVSNKALPAPIEKTISKAKGQPREPQVYTLPPSRDELTKNQVSLTCLVKGFYPSDIAVEWESNGQPENNYKTTPPVLDSDGSFFLYSKLTVDKSRWQQGNVFSCSVMHEALHNHYTQKSLSLSPG

SEQ ID NO: 240 - protein, 452 aa, artificial
  Synthetic polypeptide
ELQLQESGPGLVKPSETLSLTCTVSGGSISESSYYWGWIRQPPGKGLEWIGSIYYTGETYYAPSLKSRVTISVDTSKNQFSLKLSSVTAADTAVYYCARVKYGVGVPRYFDPWGQGTLVTVSSASTKGPSVFPLAPSSKSTSGGTAALGCLVKDYFPEPVTVSWNSGALTSGVHTFPAVLQSSGLYSLSSVVTVPSSSLGTQTYICNVNHKPSNTKVDKKVEPKSCDKTHTCPPCPAPELLGGPSVFLFPPKPKDTLMISRTPEVTCVVVDVSHEDPEVKFNWYVDGVEVHNAKTKPREEQYGSTYRVVSVLTVLHQDWLNGKEYKCKVSNKALPAPIEKTISKAKGQPREPQVYTLPPSRDELTKNQVSLWCLVKGFYPSDIAVEWESNGQPENNYKTTPPVLDSDGSFFLYSKLTVDKSRWQQGNVFSCSVMHEALHNHYTQKSLSLSPG

SEQ ID NO: 241 - protein, 452 aa, artificial
  Synthetic polypeptide
ELQLQESGPGLVKPSETLSLTCTVSGGSISESSYYWGWIRQPPGKGLEWIGSIYYTGETYYAPSLKSRVTISVDTSKNQFSLKLSSVTAADTAVYYCARVKYGVGVPRYFDPWGQGTLVTVSSASTKGPSVFPLAPSSKSTSGGTAALGCLVKDYFPEPVTVSWNSGALTSGVHTFPAVLQSSGLYSLSSVVTVPSSSLGTQTYICNVNHKPSNTKVDKKVEPKSCDKTHTCPPCPAPELLGGPSVFLFPPKPKDTLMISRTPEVTCVVVDVSHEDPEVKFNWYVDGVEVHNAKTKPREEQYGSTYRVVSVLTVLHQDWLNGKEYKCKVSNKALPAPIEKTISKAKGQPREPQVYTLPPSRDELTKNQVSLSCAVKGFYPSDIAVEWESNGQPENNYKTTPPVLDSDGSFFLVSKLTVDKSRWQQGNVFSCSVMHEALHNHYTQKSLSLSPG

SEQ ID NO: 242 - protein, 217 aa, artificial
  Synthetic polypeptide
ESVLTQPPSVSGAPGQRVTISCTGSSSNIGAGYDVHWYQQLPGTAPKLLIYGNTNRPSGVPDRFSGSKSGTSASLAITGLQAEDEADYYCQSYDISLSGWVFGGGTKLTVLGQPKAAPSVTLFPPSSEELQANKATLVCLISDFYPGAVTVAWKADSSPVKAGVETTTPSKQSNNKYAASSYLSLTPEQWKSHKSYSCQVTHEGSTVEKTVAPTECS

SEQ ID NO: 243 - protein, 452 aa, artificial
  Synthetic polypeptide
QLQLQESGPGLVKPSETLSLTCTVSGGSISTSSYYWGWIRQPPGKGLEWIGSIYYTGNTYYNPSLKSRVTISVDTSKNQFSLKLSSVTAADTAVYYCARVRYGVGVPRYFDPWGQGTLVTVSSASTKGPSVFPLAPSSKSTSGGTAALGCLVKDYFPEPVTVSWNSGALTSGVHTFPAVLQSSGLYSLSSVVTVPSSSLGTQTYICNVNHKPSNTKVDKKVEPKSCDKTHTCPPCPAPELLGGPSVFLFPPKPKDTLMISRTPEVTCVVVDVSHEDPEVKFNWYVDGVEVHNAKTKPREEQYGSTYRVVSVLTVLHQDWLNGKEYKCKVSNKALPAPIEKTISKAKGQPREPQVYTLPPSRDELTKNQVSLTCLVKGFYPSDIAVEWESNGQPENNYKTTPPVLDSDGSFFLYSKLTVDKSRWQQGNVFSCSVMHEALHNHYTQKSLSLSPG

SEQ ID NO: 244 - protein, 452 aa, artificial
  Synthetic polypeptide
QLQLQESGPGLVKPSETLSLTCTVSGGSISTSSYYWGWIRQPPGKGLEWIGSIYYTGNTYYNPSLKSRVTISVDTSKNQFSLKLSSVTAADTAVYYCARVRYGVGVPRYFDPWGQGTLVTVSSASTKGPSVFPLAPSSKSTSGGTAALGCLVKDYFPEPVTVSWNSGALTSGVHTFPAVLQSSGLYSLSSVVTVPSSSLGTQTYICNVNHKPSNTKVDKKVEPKSCDKTHTCPPCPAPELLGGPSVFLFPPKPKDTLMISRTPEVTCVVVDVSHEDPEVKFNWYVDGVEVHNAKTKPREEQYGSTYRVVSVLTVLHQDWLNGKEYKCKVSNKALPAPIEKTISKAKGQPREPQVYTLPPSRDELTKNQVSLWCLVKGFYPSDIAVEWESNGQPENNYKTTPPVLDSDGSFFLYSKLTVDKSRWQQGNVFSCSVMHEALHNHYTQKSLSLSPG

SEQ ID NO: 245 - protein, 452 aa, artificial
  Synthetic polypeptide
QLQLQESGPGLVKPSETLSLTCTVSGGSISTSSYYWGWIRQPPGKGLEWIGSIYYTGNTYYNPSLKSRVTISVDTSKNQFSLKLSSVTAADTAVYYCARVRYGVGVPRYFDPWGQGTLVTVSSASTKGPSVFPLAPSSKSTSGGTAALGCLVKDYFPEPVTVSWNSGALTSGVHTFPAVLQSSGLYSLSSVVTVPSSSLGTQTYICNVNHKPSNTKVDKKVEPKSCDKTHTCPPCPAPELLGGPSVFLFPPKPKDTLMISRTPEVTCVVVDVSHEDPEVKFNWYVDGVEVHNAKTKPREEQYGSTYRVVSVLTVLHQDWLNGKEYKCKVSNKALPAPIEKTISKAKGQPREPQVYTLPPSRDELTKNQVSLSCAVKGFYPSDIAVEWESNGQPENNYKTTPPVLDSDGSFFLVSKLTVDKSRWQQGNVFSCSVMHEALHNHYTQKSLSLSPG

SEQ ID NO: 246 - protein, 217 aa, artificial
  Synthetic polypeptide
QSVLTQPPSVSGAPGQRVTISCTGSSSNIGAHYDVHWYQQLPGTAPKLLIYGNDNRPSGVPDRFSGSKSGTSASLAITGLQAEDEADYYCQSYDYSLSGYVFGGGTKLTVLGQPKAAPSVTLFPPSSEELQANKATLVCLISDFYPGAVTVAWKADSSPVKAGVETTTPSKQSNNKYAASSYLSLTPEQWKSHKSYSCQVTHEGSTVEKTVAPTECS

SEQ ID NO: 247 - protein, 218 aa, artificial
  Synthetic polypeptide
QESVLTQPPSVSGAPGQRVTISCTGSSSNIGAGYDVHWYQQLPGTAPKLLIYGNTNRPSGVPDRFSGSKSGTSASLAITGLQAEDEADYYCQSYDISLSGWVFGGGTKLTVLGQPKAAPSVTLFPPSSEELQANKATLVCLISDFYPGAVTVAWKADSSPVKAGVETTTPSKQSNNKYAASSYLSLTPEQWKSHKSYSCQVTHEGSTVEKTVAPTECS

SEQ ID NO: 248 - protein, 451 aa, artificial
  Synthetic polypeptide
QLQLQESGPGLVKPSETLSLTCTVSGGSITSSNYYWGWIRQPPGKGLEWIGSIDYTGSTYYNPSLKSRVTISVDTSKNQFSLKLSSVTAADTAVYYCARGKYYETYLGFDVWGQGTLVTVSSASTKGPSVFPLAPSSKSTSGGTAALGCLVKDYFPEPVTVSWNSGALTSGVHTFPAVLQSSGLYSLSSVVTVPSSSLGTQTYICNVNHKPSNTKVDKKVEPKSCDKTHTCPPCPAPELLGGPSVFLFPPKPKDTLMISRTPEVTCVVVDVSHEDPEVKFNWYVDGVEVHNAKTKPREEQYGSTYRVVSVLTVLHQDWLNGKEYKCKVSNKALPAPIEKTISKAKGQPREPQVYTLPPSRDELTKNQVSLTCLVKGFYPSDIAVEWESNGQPENNYKTTPPVLDSDGSFFLYSKLTVDKSRWQQGNVFSCSVMHEALHNHYTQKSLSLSPG

SEQ ID NO: 249 - protein, 451 aa, artificial
  Synthetic polypeptide
QLQLQESGPGLVKPSETLSLTCTVSGGSITSSNYYWGWIRQPPGKGLEWIGSIDYTGSTYYNPSLKSRVTISVDTSKNQFSLKLSSVTAADTAVYYCARGKYYETYLGFDVWGQGTLVTVSSASTKGPSVFPLAPSSKSTSGGTAALGCLVKDYFPEPVTVSWNSGALTSGVHTFPAVLQSSGLYSLSSVVTVPSSSLGTQTYICNVNHKPSNTKVDKKVEPKSCDKTHTCPPCPAPELLGGPSVFLFPPKPKDTLMISRTPEVTCVVVDVSHEDPEVKFNWYVDGVEVHNAKTKPREEQYGSTYRVVSVLTVLHQDWLNGKEYKCKVSNKALPAPIEKTISKAKGQPREPQVYTLPPSRDELTKNQVSLWCLVKGFYPSDIAVEWESNGQPENNYKTTPPVLDSDGSFFLYSKLTVDKSRWQQGNVFSCSVMHEALHNHYTQKSLSLSPG

SEQ ID NO: 250 - protein, 451 aa, artificial
  Synthetic polypeptide
QLQLQESGPGLVKPSETLSLTCTVSGGSITSSNYYWGWIRQPPGKGLEWIGSIDYTGSTYYNPSLKSRVTISVDTSKNQFSLKLSSVTAADTAVYYCARGKYYETYLGFDVWGQGTLVTVSSASTKGPSVFPLAPSSKSTSGGTAALGCLVKDYFPEPVTVSWNSGALTSGVHTFPAVLQSSGLYSLSSVVTVPSSSLGTQTYICNVNHKPSNTKVDKKVEPKSCDKTHTCPPCPAPELLGGPSVFLFPPKPKDTLMISRTPEVTCVVVDVSHEDPEVKFNWYVDGVEVHNAKTKPREEQYGSTYRVVSVLTVLHQDWLNGKEYKCKVSNKALPAPIEKTISKAKGQPREPQVYTLPPSRDELTKNQVSLSCAVKGFYPSDIAVEWESNGQPENNYKTTPPVLDSDGSFFLVSKLTVDKSRWQQGNVFSCSVMHEALHNHYTQKSLSLSPG

SEQ ID NO: 251 - protein, 7 aa, artificial
  Synthetic polypeptide
  VARIANT (1)..(1): X at 1 is T, D, E, or N.
  VARIANT (2)..(2): X at 2 is S, A, E, G, K, Q, R, or T.
  VARIANT (3)..(3): X at 3 is S, A, D, E, G, N, P, Q, or T.
  VARIANT (5)..(5): X at 5 is Y, A, E, G, H, M, N, Q, S, T, or V.
  VARIANT (7)..(7): X at 7 is W, F, I, V, or Y.
XXXNXYX

SEQ ID NO: 252 - protein, 7 aa, artificial
  Synthetic polypeptide
DSSNYYW

SEQ ID NO: 253 - protein, 7 aa, artificial
  Synthetic polypeptide
ESSNYYW

SEQ ID NO: 254 - protein, 7 aa, artificial
  Synthetic polypeptide
NSSNYYW

SEQ ID NO: 255 - protein, 7 aa, artificial
  Synthetic polypeptide
TASNYYW

SEQ ID NO: 256 - protein, 7 aa, artificial
  Synthetic polypeptide
TESNYYW

SEQ ID NO: 257 - protein, 7 aa, artificial
  Synthetic polypeptide
TGSNYYW

SEQ ID NO: 258 - protein, 7 aa, artificial
  Synthetic polypeptide
TKSNYYW

SEQ ID NO: 259 - protein, 7 aa, artificial
  Synthetic polypeptide
TQSNYYW

SEQ ID NO: 260 - protein, 7 aa, artificial
  Synthetic polypeptide
TRSNYYW

SEQ ID NO: 261 - protein, 7 aa, artificial
  Synthetic polypeptide
TTSNYYW

SEQ ID NO: 262 - protein, 7 aa, artificial
  Synthetic polypeptide
TSANYYW

SEQ ID NO: 263 - protein, 7 aa, artificial
  Synthetic polypeptide
TSDNYYW

SEQ ID NO: 264 - protein, 7 aa, artificial
  Synthetic polypeptide
TSENYYW

SEQ ID NO: 265 - protein, 7 aa, artificial
  Synthetic polypeptide
TSGNYYW

SEQ ID NO: 266 - protein, 7 aa, artificial
  Synthetic polypeptide
TSNNYYW

SEQ ID NO: 267 - protein, 7 aa, artificial
  Synthetic polypeptide
TSPNYYW

SEQ ID NO: 268 - protein, 7 aa, artificial
  Synthetic polypeptide
TSQNYYW

SEQ ID NO: 269 - protein, 7 aa, artificial
  Synthetic polypeptide
TSTNYYW

SEQ ID NO: 270 - protein, 7 aa, artificial
  Synthetic polypeptide
TSSNAYW

SEQ ID NO: 271 - protein, 7 aa, artificial
  Synthetic polypeptide
TSSNEYW

SEQ ID NO: 272 - protein, 7 aa, artificial
  Synthetic polypeptide
TSSNGYW

SEQ ID NO: 273 - protein, 7 aa, artificial
  Synthetic polypeptide
TSSNHYW

SEQ ID NO: 274 - protein, 7 aa, artificial
  Synthetic polypeptide
TSSNMYW

SEQ ID NO: 275 - protein, 7 aa, artificial
  Synthetic polypeptide
TSSNNYW

SEQ ID NO: 276 - protein, 7 aa, artificial
  Synthetic polypeptide
TSSNQYW

SEQ ID NO: 277 - protein, 7 aa, artificial
  Synthetic polypeptide
TSSNSYW

SEQ ID NO: 278 - protein, 7 aa, artificial
  Synthetic polypeptide
TSSNTYW

SEQ ID NO: 279 - protein, 7 aa, artificial
  Synthetic polypeptide
TSSNVYW

SEQ ID NO: 280 - protein, 7 aa, artificial
  Synthetic polypeptide
TSSNYYF

SEQ ID NO: 281 - protein, 7 aa, artificial
  Synthetic polypeptide
TSSNYYI

SEQ ID NO: 282 - protein, 7 aa, artificial
  Synthetic polypeptide
TSSNYYV

SEQ ID NO: 283 - protein, 7 aa, artificial
  Synthetic polypeptide
TSSNYYY

SEQ ID NO: 284 - protein, 12 aa, artificial
  Synthetic polypeptide
  VARIANT (1)..(1): X at 1 is S, N, or T.
  VARIANT (2)..(2): X at 2 is I, M, or V.
  VARIANT (4)..(4): X at 4 is Y, or H.
  VARIANT (5)..(5): X at 5 is T, H, L, or N.
  VARIANT (6)..(6): X at 6 is G, A, D, E, H, K, N, Q, R, S, or T.
  VARIANT (7)..(7): X at 7 is S, A, D, Q, or T.
  VARIANT (8)..(8): X at 8 is T, A, D, or E.
  VARIANT (9)..(9): X at 9 is Y, A, F, Q, S, or W.
  VARIANT (11)..(11): X at 11 is N, D, E, H, P, or Q.
  VARIANT (12)..(12): X at 12 is P, A, or E.
XXDXXXXXXYXX

SEQ ID NO: 285 - protein, 12 aa, artificial
  Synthetic polypeptide
NIDYTGSTYYNP

SEQ ID NO: 286 - protein, 12 aa, artificial
  Synthetic polypeptide
TIDYTGSTYYNP

SEQ ID NO: 287 - protein, 12 aa, artificial
  Synthetic polypeptide
SMDYTGSTYYNP

SEQ ID NO: 288 - protein, 12 aa, artificial
  Synthetic polypeptide
SVDYTGSTYYNP

SEQ ID NO: 289 - protein, 12 aa, artificial
  Synthetic polypeptide
SIDHTGSTYYNP

SEQ ID NO: 290 - protein, 12 aa, artificial
  Synthetic polypeptide
SIDYHGSTYYNP

SEQ ID NO: 291 - protein, 12 aa, artificial
  Synthetic polypeptide
SIDYLGSTYYNP

SEQ ID NO: 292 - protein, 12 aa, artificial
  Synthetic polypeptide
SIDYNGSTYYNP

SEQ ID NO: 293 - protein, 12 aa, artificial
  Synthetic polypeptide
SIDYTASTYYNP

SEQ ID NO: 294 - protein, 12 aa, artificial
  Synthetic polypeptide
SIDYTDSTYYNP

SEQ ID NO: 295 - protein, 12 aa, artificial
  Synthetic polypeptide
SIDYTESTYYNP

SEQ ID NO: 296 - protein, 12 aa, artificial
  Synthetic polypeptide
SIDYTHSTYYNP

SEQ ID NO: 297 - protein, 12 aa, artificial
  Synthetic polypeptide
SIDYTKSTYYNP

SEQ ID NO: 298 - protein, 12 aa, artificial
  Synthetic polypeptide
SIDYTNSTYYNP

SEQ ID NO: 299 - protein, 12 aa, artificial
  Synthetic polypeptide
SIDYTQSTYYNP

SEQ ID NO: 300 - protein, 12 aa, artificial
  Synthetic polypeptide
SIDYTRSTYYNP

SEQ ID NO: 301 - protein, 12 aa, artificial
  Synthetic polypeptide
SIDYTSSTYYNP

SEQ ID NO: 302 - protein, 12 aa, artificial
  Synthetic polypeptide
SIDYTTSTYYNP

SEQ ID NO: 303 - protein, 12 aa, artificial
  Synthetic polypeptide
SIDYTGATYYNP

SEQ ID NO: 304 - protein, 12 aa, artificial
  Synthetic polypeptide
SIDYTGDTYYNP

SEQ ID NO: 305 - protein, 12 aa, artificial
  Synthetic polypeptide
SIDYTGQTYYNP

SEQ ID NO: 306 - protein, 12 aa, artificial
  Synthetic polypeptide
SIDYTGTTYYNP

SEQ ID NO: 307 - protein, 12 aa, artificial
  Synthetic polypeptide
SIDYTGSAYYNP

SEQ ID NO: 308 - protein, 12 aa, artificial
  Synthetic polypeptide
SIDYTGSDYYNP

SEQ ID NO: 309 - protein, 12 aa, artificial
  Synthetic polypeptide
SIDYTGSEYYNP

SEQ ID NO: 310 - protein, 12 aa, artificial
  Synthetic polypeptide
SIDYTGSTAYNP

SEQ ID NO: 311 - protein, 12 aa, artificial
  Synthetic polypeptide
SIDYTGSTFYNP

SEQ ID NO: 312 - protein, 12 aa, artificial
  Synthetic polypeptide
SIDYTGSTQYNP

SEQ ID NO: 313 - protein, 12 aa, artificial
  Synthetic polypeptide
SIDYTGSTSYNP

SEQ ID NO: 314 - protein, 12 aa, artificial
  Synthetic polypeptide
SIDYTGSTWYNP

SEQ ID NO: 315 - protein, 12 aa, artificial
  Synthetic polypeptide
SIDYTGSTYYDP

SEQ ID NO: 316 - protein, 12 aa, artificial
  Synthetic polypeptide
SIDYTGSTYYEP

SEQ ID NO: 317 - protein, 12 aa, artificial
  Synthetic polypeptide
SIDYTGSTYYHP

SEQ ID NO: 318 - protein, 12 aa, artificial
  Synthetic polypeptide
SIDYTGSTYYPP

SEQ ID NO: 319 - protein, 12 aa, artificial
  Synthetic polypeptide
SIDYTGSTYYQP

SEQ ID NO: 320 - protein, 12 aa, artificial
  Synthetic polypeptide
SIDYTGSTYYNA

SEQ ID NO: 321 - protein, 12 aa, artificial
  Synthetic polypeptide
SIDYTGSTYYNE

SEQ ID NO: 322 - protein, 14 aa, artificial
  Synthetic polypeptide
  VARIANT (2)..(2): X at 2 is R, A, E, G, H, M, N, Q, S, T, or Y.
  VARIANT (4)..(4): X at 4 is K, A, or S.
  VARIANT (7)..(7): X at 7 is E, or T.
AXGXYYXTYLGFDV

SEQ ID NO: 323 - protein, 14 aa, artificial
  Synthetic polypeptide
AAGKYYETYLGFDV

SEQ ID NO: 324 - protein, 14 aa, artificial
  Synthetic polypeptide
AEGKYYETYLGFDV

SEQ ID NO: 325 - protein, 14 aa, artificial
  Synthetic polypeptide
AGGKYYETYLGFDV

SEQ ID NO: 326 - protein, 14 aa, artificial
  Synthetic polypeptide
AHGKYYETYLGFDV

SEQ ID NO: 327 - protein, 14 aa, artificial
  Synthetic polypeptide
AMGKYYETYLGFDV

SEQ ID NO: 328 - protein, 14 aa, artificial
  Synthetic polypeptide
ANGKYYETYLGFDV

SEQ ID NO: 329 - protein, 14 aa, artificial
  Synthetic polypeptide
AQGKYYETYLGFDV

SEQ ID NO: 330 - protein, 14 aa, artificial
  Synthetic polypeptide
ASGKYYETYLGFDV

SEQ ID NO: 331 - protein, 14 aa, artificial
  Synthetic polypeptide
ATGKYYETYLGFDV

SEQ ID NO: 332 - protein, 14 aa, artificial
  Synthetic polypeptide
AYGKYYETYLGFDV

SEQ ID NO: 333 - protein, 14 aa, artificial
  Synthetic polypeptide
ARGAYYETYLGFDV

SEQ ID NO: 334 - protein, 14 aa, artificial
  Synthetic polypeptide
ARGSYYETYLGFDV

SEQ ID NO: 335 - protein, 14 aa, artificial
  Synthetic polypeptide
ARGKYYTTYLGFDV

SEQ ID NO: 336 - protein, 7 aa, artificial
  Synthetic polypeptide
  VARIANT (1)..(1): X at 1 is S, or D.
  VARIANT (2)..(2): X at 2 is T, A, D, E, G, H, K, N, P, Q, R, or S.
  VARIANT (3)..(3): X at 3 is S, D, E, G, K, N, P, or R.
  VARIANT (4)..(4): X at 4 is S, G, K, N, or P.
  VARIANT (5)..(5): X at 5 is Y, A, D, E, G, H, M, N, Q, S, T, V, or W.
  VARIANT (6)..(6): X at 6 is Y, A, F, G, H, M, N, or Q.
XXXXXXW

SEQ ID NO: 337 - protein, 7 aa, artificial
  Synthetic polypeptide
DTSSYYW

SEQ ID NO: 338 - protein, 7 aa, artificial
  Synthetic polypeptide
SASSYYW

SEQ ID NO: 339 - protein, 7 aa, artificial
  Synthetic polypeptide
SDSSYYW

SEQ ID NO: 340 - protein, 7 aa, artificial
  Synthetic polypeptide
SESSYYW

SEQ ID NO: 341 - protein, 7 aa, artificial
  Synthetic polypeptide
SGSSYYW

SEQ ID NO: 342 - protein, 7 aa, artificial
  Synthetic polypeptide
SHSSYYW

SEQ ID NO: 343 - protein, 7 aa, artificial
  Synthetic polypeptide
SKSSYYW

SEQ ID NO: 344 - protein, 7 aa, artificial
  Synthetic polypeptide
SNSSYYW

SEQ ID NO: 345 - protein, 7 aa, artificial
  Synthetic polypeptide
SPSSYYW

SEQ ID NO: 346 - protein, 7 aa, artificial
  Synthetic polypeptide
SQSSYYW

SEQ ID NO: 347 - protein, 7 aa, artificial
  Synthetic polypeptide
SRSSYYW

SEQ ID NO: 348 - protein, 7 aa, artificial
  Synthetic polypeptide
SSSSYYW

SEQ ID NO: 349 - protein, 7 aa, artificial
  Synthetic polypeptide
STDSYYW

SEQ ID NO: 350 - protein, 7 aa, artificial
  Synthetic polypeptide
STESYYW

SEQ ID NO: 351 - protein, 7 aa, artificial
  Synthetic polypeptide
STGSYYW

SEQ ID NO: 352 - protein, 7 aa, artificial
  Synthetic polypeptide
STKSYYW

SEQ ID NO: 353 - protein, 7 aa, artificial
  Synthetic polypeptide
STNSYYW

SEQ ID NO: 354 - protein, 7 aa, artificial
  Synthetic polypeptide
STPSYYW

SEQ ID NO: 355 - protein, 7 aa, artificial
  Synthetic polypeptide
STRSYYW

SEQ ID NO: 356 - protein, 7 aa, artificial
  Synthetic polypeptide
STSGYYW

SEQ ID NO: 357 - protein, 7 aa, artificial
  Synthetic polypeptide
STSKYYW

SEQ ID NO: 358 - protein, 7 aa, artificial
  Synthetic polypeptide
STSNYYW

SEQ ID NO: 359 - protein, 7 aa, artificial
  Synthetic polypeptide
STSPYYW

SEQ ID NO: 360 - protein, 7 aa, artificial
  Synthetic polypeptide
STSSAYW

SEQ ID NO: 361 - protein, 7 aa, artificial
  Synthetic polypeptide
STSSDYW

SEQ ID NO: 362 - protein, 7 aa, artificial
  Synthetic polypeptide
STSSEYW

SEQ ID NO: 363 - protein, 7 aa, artificial
  Synthetic polypeptide
STSSGYW

SEQ ID NO: 364 - protein, 7 aa, artificial
  Synthetic polypeptide
STSSHYW

SEQ ID NO: 365 - protein, 7 aa, artificial
  Synthetic polypeptide
STSSMYW

SEQ ID NO: 366 - protein, 7 aa, artificial
  Synthetic polypeptide
STSSNYW

SEQ ID NO: 367 - protein, 7 aa, artificial
  Synthetic polypeptide
STSSQYW

SEQ ID NO: 368 - protein, 7 aa, artificial
  Synthetic polypeptide
STSSSYW

SEQ ID NO: 369 - protein, 7 aa, artificial
  Synthetic polypeptide
STSSTYW

SEQ ID NO: 370 - protein, 7 aa, artificial
  Synthetic polypeptide
STSSVYW

SEQ ID NO: 371 - protein, 7 aa, artificial
  Synthetic polypeptide
STSSWYW

SEQ ID NO: 372 - protein, 7 aa, artificial
  Synthetic polypeptide
STSSYAW

SEQ ID NO: 373 - protein, 7 aa, artificial
  Synthetic polypeptide
STSSYFW

SEQ ID NO: 374 - protein, 7 aa, artificial
  Synthetic polypeptide
STSSYGW

SEQ ID NO: 375 - protein, 7 aa, artificial
  Synthetic polypeptide
STSSYHW

SEQ ID NO: 376 - protein, 7 aa, artificial
  Synthetic polypeptide
STSSYMW

SEQ ID NO: 377 - protein, 7 aa, artificial
  Synthetic polypeptide
STSSYNW

SEQ ID NO: 378 - protein, 7 aa, artificial
  Synthetic polypeptide
STSSYQW

SEQ ID NO: 379 - protein, 12 aa, artificial
  Synthetic polypeptide
  VARIANT (1)..(1): X at 1 is S, F, I, M, or Q.
  VARIANT (2)..(2): X at 2 is I, A, G, L, R, S, T, or V.
  VARIANT (3)..(3): X at 3 is Y, A, D, E, F, G, H, K, L, M, N, P, Q, R, S, T, or W.
  VARIANT (4)..(4): X at 4 is Y, A, D, E, F, G, H, K, N, P, Q, R, S, T, or W.
  VARIANT (5)..(5): X at 5 is T, D, E, K, N, P, or Q.
  VARIANT (6)..(6): X at 6 is G, or Q.
  VARIANT (7)..(7): X at 7 is N, D, E, G, H, I, K, M, P, R, or S.
  VARIANT (8)..(8): X at 8 is T, A, E, F, G, H, K, P, Q, R, S, V, W, or Y.
  VARIANT (9)..(9): X at 9 is Y, or W.
  VARIANT (11)..(11): X at 11 is N, A, D, E, K, L, M, P, Q, S or T.
  misc_feature (11)..(11): Xaa can be any naturally occurring amino acid
XXXXXXXXXYXP

SEQ ID NO: 380 - protein, 12 aa, artificial
  Synthetic polypeptide
FIYYTGNTYYNP

SEQ ID NO: 381 - protein, 12 aa, artificial
  Synthetic polypeptide
IIYYTGNTYYNP

SEQ ID NO: 382 - protein, 12 aa, artificial
  Synthetic polypeptide
MIYYTGNTYYNP

SEQ ID NO: 383 - protein, 12 aa, artificial
  Synthetic polypeptide
QIYYTGNTYYNP

SEQ ID NO: 384 - protein, 12 aa, artificial
  Synthetic polypeptide
SAYYTGNTYYNP

SEQ ID NO: 385 - protein, 12 aa, artificial
  Synthetic polypeptide
SGYYTGNTYYNP

SEQ ID NO: 386 - protein, 12 aa, artificial
  Synthetic polypeptide
SLYYTGNTYYNP

SEQ ID NO: 387 - protein, 12 aa, artificial
  Synthetic polypeptide
SRYYTGNTYYNP

SEQ ID NO: 388 - protein, 12 aa, artificial
  Synthetic polypeptide
SSYYTGNTYYNP

SEQ ID NO: 389 - protein, 12 aa, artificial
  Synthetic polypeptide
STYYTGNTYYNP

SEQ ID NO: 390 - protein, 12 aa, artificial
  Synthetic polypeptide
SVYYTGNTYYNP

SEQ ID NO: 391 - protein, 12 aa, artificial
  Synthetic polypeptide
SIAYTGNTYYNP

SEQ ID NO: 392 - protein, 12 aa, artificial
  Synthetic polypeptide
SIDYTGNTYYNP

SEQ ID NO: 393 - protein, 12 aa, artificial
  Synthetic polypeptide
SIEYTGNTYYNP

SEQ ID NO: 394 - protein, 12 aa, artificial
  Synthetic polypeptide
SIFYTGNTYYNP

SEQ ID NO: 395 - protein, 12 aa, artificial
  Synthetic polypeptide
SIGYTGNTYYNP

SEQ ID NO: 396 - protein, 12 aa, artificial
  Synthetic polypeptide
SIHYTGNTYYNP

SEQ ID NO: 397 - protein, 12 aa, artificial
  Synthetic polypeptide
SIKYTGNTYYNP

SEQ ID NO: 398 - protein, 12 aa, artificial
  Synthetic polypeptide
SILYTGNTYYNP

SEQ ID NO: 399 - protein, 12 aa, artificial
  Synthetic polypeptide
SIMYTGNTYYNP

SEQ ID NO: 400 - protein, 12 aa, artificial
  Synthetic polypeptide
SINYTGNTYYNP

SEQ ID NO: 401 - protein, 12 aa, artificial
  Synthetic polypeptide
SIPYTGNTYYNP

SEQ ID NO: 402 - protein, 12 aa, artificial
  Synthetic polypeptide
SIQYTGNTYYNP

SEQ ID NO: 403 - protein, 12 aa, artificial
  Synthetic polypeptide
SIRYTGNTYYNP

SEQ ID NO: 404 - protein, 12 aa, artificial
  Synthetic polypeptide
SISYTGNTYYNP

SEQ ID NO: 405 - protein, 12 aa, artificial
  Synthetic polypeptide
SITYTGNTYYNP

SEQ ID NO: 406 - protein, 12 aa, artificial
  Synthetic polypeptide
SIWYTGNTYYNP

SEQ ID NO: 407 - protein, 12 aa, artificial
  Synthetic polypeptide
SIYATGNTYYNP

SEQ ID NO: 408 - protein, 12 aa, artificial
  Synthetic polypeptide
SIYDTGNTYYNP

SEQ ID NO: 409 - protein, 12 aa, artificial
  Synthetic polypeptide
SIYETGNTYYNP

SEQ ID NO: 410 - protein, 12 aa, artificial
  Synthetic polypeptide
SIYFTGNTYYNP

SEQ ID NO: 411 - protein, 12 aa, artificial
  Synthetic polypeptide
SIYGTGNTYYNP

SEQ ID NO: 412 - protein, 12 aa, artificial
  Synthetic polypeptide
SIYHTGNTYYNP

SEQ ID NO: 413 - protein, 12 aa, artificial
  Synthetic polypeptide
SIYKTGNTYYNP

SEQ ID NO: 414 - protein, 12 aa, artificial
  Synthetic polypeptide
SIYNTGNTYYNP

SEQ ID NO: 415 - protein, 12 aa, artificial
  Synthetic polypeptide
SIYPTGNTYYNP

SEQ ID NO: 416 - protein, 12 aa, artificial
  Synthetic polypeptide
SIYQTGNTYYNP

SEQ ID NO: 417 - protein, 12 aa, artificial
  Synthetic polypeptide
SIYRTGNTYYNP

SEQ ID NO: 418 - protein, 12 aa, artificial
  Synthetic polypeptide
SIYSTGNTYYNP

SEQ ID NO: 419 - protein, 12 aa, artificial
  Synthetic polypeptide
SIYTTGNTYYNP

SEQ ID NO: 420 - protein, 12 aa, artificial
  Synthetic polypeptide
SIYWTGNTYYNP

SEQ ID NO: 421 - protein, 12 aa, artificial
  Synthetic polypeptide
SIYYDGNTYYNP

SEQ ID NO: 422 - protein, 12 aa, artificial
  Synthetic polypeptide
SIYYEGNTYYNP

SEQ ID NO: 423 - protein, 12 aa, artificial
  Synthetic polypeptide
SIYYKGNTYYNP

SEQ ID NO: 424 - protein, 12 aa, artificial
  Synthetic polypeptide
SIYYNGNTYYNP

SEQ ID NO: 425 - protein, 12 aa, artificial
  Synthetic polypeptide
SIYYPGNTYYNP

SEQ ID NO: 426 - protein, 12 aa, artificial
  Synthetic polypeptide
SIYYQGNTYYNP

SEQ ID NO: 427 - protein, 12 aa, artificial
  Synthetic polypeptide
SIYYTQNTYYNP

SEQ ID NO: 428 - protein, 12 aa, artificial
  Synthetic polypeptide
SIYYTGDTYYNP

SEQ ID NO: 429 - protein, 12 aa, artificial
  Synthetic polypeptide
SIYYTGETYYNP

SEQ ID NO: 430 - protein, 12 aa, artificial
  Synthetic polypeptide
SIYYTGGTYYNP

SEQ ID NO: 431 - protein, 12 aa, artificial
  Synthetic polypeptide
SIYYTGHTYYNP

SEQ ID NO: 432 - protein, 12 aa, artificial
  Synthetic polypeptide
SIYYTGITYYNP

SEQ ID NO: 433 - protein, 12 aa, artificial
  Synthetic polypeptide
SIYYTGKTYYNP

SEQ ID NO: 434 - protein, 12 aa, artificial
  Synthetic polypeptide
SIYYTGMTYYNP

SEQ ID NO: 435 - protein, 12 aa, artificial
  Synthetic polypeptide
SIYYTGPTYYNP

SEQ ID NO: 436 - protein, 12 aa, artificial
  Synthetic polypeptide
SIYYTGRTYYNP

SEQ ID NO: 437 - protein, 12 aa, artificial
  Synthetic polypeptide
SIYYTGSTYYNP

SEQ ID NO: 438 - protein, 12 aa, artificial
  Synthetic polypeptide
SIYYTGNAYYNP

SEQ ID NO: 439 - protein, 12 aa, artificial
  Synthetic polypeptide
SIYYTGNEYYNP

SEQ ID NO: 440 - protein, 12 aa, artificial
  Synthetic polypeptide
SIYYTGNFYYNP

SEQ ID NO: 441 - protein, 12 aa, artificial
  Synthetic polypeptide
SIYYTGNGYYNP

SEQ ID NO: 442 - protein, 12 aa, artificial
  Synthetic polypeptide
SIYYTGNHYYNP

SEQ ID NO: 443 - protein, 12 aa, artificial
  Synthetic polypeptide
SIYYTGNKYYNP

SEQ ID NO: 444 - protein, 12 aa, artificial
  Synthetic polypeptide
SIYYTGNPYYNP

SEQ ID NO: 445 - protein, 12 aa, artificial
  Synthetic polypeptide
SIYYTGNQYYNP

SEQ ID NO: 446 - protein, 12 aa, artificial
  Synthetic polypeptide
SIYYTGNRYYNP

SEQ ID NO: 447 - protein, 12 aa, artificial
  Synthetic polypeptide
SIYYTGNSYYNP

SEQ ID NO: 448 - protein, 12 aa, artificial
  Synthetic polypeptide
SIYYTGNVYYNP

SEQ ID NO: 449 - protein, 12 aa, artificial
  Synthetic polypeptide
SIYYTGNWYYNP

SEQ ID NO: 450 - protein, 12 aa, artificial
  Synthetic polypeptide
SIYYTGNYYYNP

SEQ ID NO: 451 - protein, 12 aa, artificial
  Synthetic polypeptide
SIYYTGNTWYNP

SEQ ID NO: 452 - protein, 12 aa, artificial
  Synthetic polypeptide
SIYYTGNTYYAP

SEQ ID NO: 453 - protein, 12 aa, artificial
  Synthetic polypeptide
SIYYTGNTYYDP

SEQ ID NO: 454 - protein, 12 aa, artificial
  Synthetic polypeptide
SIYYTGNTYYEP

SEQ ID NO: 455 - protein, 12 aa, artificial
  Synthetic polypeptide
SIYYTGNTYYKP

SEQ ID NO: 456 - protein, 12 aa, artificial
  Synthetic polypeptide
SIYYTGNTYYLP

SEQ ID NO: 457 - protein, 12 aa, artificial
  Synthetic polypeptide
SIYYTGNTYYMP

SEQ ID NO: 458 - protein, 12 aa, artificial
  Synthetic polypeptide
SIYYTGNTYYPP

SEQ ID NO: 459 - protein, 12 aa, artificial
  Synthetic polypeptide
SIYYTGNTYYQP

SEQ ID NO: 460 - protein, 12 aa, artificial
  Synthetic polypeptide
SIYYTGNTYYSP

SEQ ID NO: 461 - protein, 12 aa, artificial
  Synthetic polypeptide
SIYYTGNTYYTP

SEQ ID NO: 462 - protein, 15 aa, artificial
  Synthetic polypeptide
  VARIANT (1)..(1): X at 1 is A, or V.
  VARIANT (2)..(2): X at 2 is R, A, G, N, Q, or T.
  VARIANT (3)..(3): X at 3 is V, A, F, I, K, L, M, Q, or S.
  VARIANT (4)..(4): X at 4 is R, A, I, K, L, M, P, Q, S, T, or V.
  VARIANT (5)..(5): X at 5 is Y, H, I, L, or V.
  VARIANT (7)..(7): X at 7 is V, A, F, G, K, M, N, Q, R, S, T, W, or Y.
  VARIANT (8)..(8): X at 8 is G, N, R, S, or T.
  VARIANT (12)..(12): X at 12 is Y, F, H, I, L, M, Q, or R.
XXXXXGXXVPRXFDP

SEQ ID NO: 463 - protein, 15 aa, artificial
  Synthetic polypeptide
VRVRYGVGVPRYFDP

SEQ ID NO: 464 - protein, 15 aa, artificial
  Synthetic polypeptide
AAVRYGVGVPRYFDP

SEQ ID NO: 465 - protein, 15 aa, artificial
  Synthetic polypeptide
AGVRYGVGVPRYFDP

SEQ ID NO: 466 - protein, 15 aa, artificial
  Synthetic polypeptide
ANVRYGVGVPRYFDP

SEQ ID NO: 467 - protein, 15 aa, artificial
  Synthetic polypeptide
AQVRYGVGVPRYFDP

SEQ ID NO: 468 - protein, 15 aa, artificial
  Synthetic polypeptide
ATVRYGVGVPRYFDP

SEQ ID NO: 469 - protein, 15 aa, artificial
  Synthetic polypeptide
ARARYGVGVPRYFDP

SEQ ID NO: 470 - protein, 15 aa, artificial
  Synthetic polypeptide
ARFRYGVGVPRYFDP

SEQ ID NO: 471 - protein, 15 aa, artificial
  Synthetic polypeptide
ARIRYGVGVPRYFDP

SEQ ID NO: 472 - protein, 15 aa, artificial
  Synthetic polypeptide
ARKRYGVGVPRYFDP

SEQ ID NO: 473 - protein, 15 aa, artificial
  Synthetic polypeptide
ARLRYGVGVPRYFDP

SEQ ID NO: 474 - protein, 15 aa, artificial
  Synthetic polypeptide
ARMRYGVGVPRYFDP

SEQ ID NO: 475 - protein, 15 aa, artificial
  Synthetic polypeptide
ARQRYGVGVPRYFDP

SEQ ID NO: 476 - protein, 15 aa, artificial
  Synthetic polypeptide
ARSRYGVGVPRYFDP

SEQ ID NO: 477 - protein, 15 aa, artificial
  Synthetic polypeptide
ARVAYGVGVPRYFDP

SEQ ID NO: 478 - protein, 15 aa, artificial
  Synthetic polypeptide
ARVIYGVGVPRYFDP

SEQ ID NO: 479 - protein, 15 aa, artificial
  Synthetic polypeptide
ARVKYGVGVPRYFDP

SEQ ID NO: 480 - protein, 15 aa, artificial
  Synthetic polypeptide
ARVLYGVGVPRYFDP

SEQ ID NO: 481 - protein, 15 aa, artificial
  Synthetic polypeptide
ARVMYGVGVPRYFDP

SEQ ID NO: 482 - protein, 15 aa, artificial
  Synthetic polypeptide
ARVPYGVGVPRYFDP

SEQ ID NO: 483 - protein, 15 aa, artificial
  Synthetic polypeptide
ARVQYGVGVPRYFDP

SEQ ID NO: 484 - protein, 15 aa, artificial
  Synthetic polypeptide
ARVSYGVGVPRYFDP

SEQ ID NO: 485 - protein, 15 aa, artificial
  Synthetic polypeptide
ARVTYGVGVPRYFDP

SEQ ID NO: 486 - protein, 15 aa, artificial
  Synthetic polypeptide
ARVVYGVGVPRYFDP

SEQ ID NO: 487 - protein, 15 aa, artificial
  Synthetic polypeptide
ARVRHGVGVPRYFDP

SEQ ID NO: 488 - protein, 15 aa, artificial
  Synthetic polypeptide
ARVRIGVGVPRYFDP

SEQ ID NO: 489 - protein, 15 aa, artificial
  Synthetic polypeptide
ARVRLGVGVPRYFDP

SEQ ID NO: 490 - protein, 15 aa, artificial
  Synthetic polypeptide
ARVRVGVGVPRYFDP

SEQ ID NO: 491 - protein, 15 aa, artificial
  Synthetic polypeptide
ARVRYGAGVPRYFDP

SEQ ID NO: 492 - protein, 15 aa, artificial
  Synthetic polypeptide
ARVRYGFGVPRYFDP

SEQ ID NO: 493 - protein, 15 aa, artificial
  Synthetic polypeptide
ARVRYGGGVPRYFDP

SEQ ID NO: 494 - protein, 15 aa, artificial
  Synthetic polypeptide
ARVRYGKGVPRYFDP

SEQ ID NO: 495 - protein, 15 aa, artificial
  Synthetic polypeptide
ARVRYGMGVPRYFDP

SEQ ID NO: 496 - protein, 15 aa, artificial
  Synthetic polypeptide
ARVRYGNGVPRYFDP

SEQ ID NO: 497 - protein, 15 aa, artificial
  Synthetic polypeptide
ARVRYGQGVPRYFDP

SEQ ID NO: 498 - protein, 15 aa, artificial
  Synthetic polypeptide
ARVRYGRGVPRYFDP

SEQ ID NO: 499 - protein, 15 aa, artificial
  Synthetic polypeptide
ARVRYGSGVPRYFDP

SEQ ID NO: 500 - protein, 15 aa, artificial
  Synthetic polypeptide
ARVRYGTGVPRYFDP

SEQ ID NO: 501 - protein, 15 aa, artificial
  Synthetic polypeptide
ARVRYGWGVPRYFDP

SEQ ID NO: 502 - protein, 15 aa, artificial
  Synthetic polypeptide
ARVRYGYGVPRYFDP

SEQ ID NO: 503 - protein, 15 aa, artificial
  Synthetic polypeptide
ARVRYGVNVPRYFDP

SEQ ID NO: 504 - protein, 15 aa, artificial
  Synthetic polypeptide
ARVRYGVRVPRYFDP

SEQ ID NO: 505 - protein, 15 aa, artificial
  Synthetic polypeptide
ARVRYGVSVPRYFDP

SEQ ID NO: 506 - protein, 15 aa, artificial
  Synthetic polypeptide
ARVRYGVTVPRYFDP

SEQ ID NO: 507 - protein, 15 aa, artificial
  Synthetic polypeptide
ARVRYGVGVPRFFDP

SEQ ID NO: 508 - protein, 15 aa, artificial
  Synthetic polypeptide
ARVRYGVGVPRHFDP

SEQ ID NO: 509 - protein, 15 aa, artificial
  Synthetic polypeptide
ARVRYGVGVPRIFDP

SEQ ID NO: 510 - protein, 15 aa, artificial
  Synthetic polypeptide
ARVRYGVGVPRLFDP

SEQ ID NO: 511 - protein, 15 aa, artificial
  Synthetic polypeptide
ARVRYGVGVPRMFDP

SEQ ID NO: 512 - protein, 15 aa, artificial
  Synthetic polypeptide
ARVRYGVGVPRQFDP

SEQ ID NO: 513 - protein, 15 aa, artificial
  Synthetic polypeptide
ARVRYGVGVPRRFDP

SEQ ID NO: 514 - DNA, 20 bp, artificial
  Synthetic oligonucleotide
taagcttggccgccatggcc

SEQ ID NO: 515 - DNA, 20 bp, artificial
  Synthetic oligonucleotide
acccggagacagggagaggc

SEQ ID NO: 516 - DNA, 25 bp, artificial
  Synthetic oligonucleotide
ctgtctccgggttaagattacaagg

SEQ ID NO: 517 - DNA, 25 bp, artificial
  Synthetic oligonucleotide
ccttgtaatcttaacccggagacag

SEQ ID NO: 518 - protein, 452 aa, artificial
  Synthetic polypeptide
ELQLQESGPGLVKPSETLSLTCTVSGGSITSSNYYWGWIRQPPGKGLEWIGSIDYTGSTYYNPSLKSRVTISVDTSKNQFSLKLSSVTAADTAVYYCARGKYYETYLGFDVWGQGTLVTVSSASTKGPSVFPLAPSSKSTSGGTAALGCLVKDYFPEPVTVSWNSGALTSGVHTFPAVLQSSGLYSLSSVVTVPSSSLGTQTYICNVNHKPSNTKVDKKVEPKSCDKTHTCPPCPAPELLGGPSVFLFPPKPKDTLMISRTPEVTCVVVDVSHEDPEVKFNWYVDGVEVHNAKTKPREEQYGSTYRVVSVLTVLHQDWLNGKEYKCKVSNKALPAPIEKTISKAKGQPREPQVYTLPPSRDELTKNQVSLTCLVKGFYPSDIAVEWESNGQPENNYKTTPPVLDSDGSFFLYSKLTVDKSRWQQGNVFSCSVMHEALHNHYTQKSLSLSPGK

SEQ ID NO: 519 - protein, 451 aa, artificial
  Synthetic polypeptide
ELQLQESGPGLVKPSETLSLTCTVSGGSITSSNYYWGWIRQPPGKGLEWIGSIDYTGSTYYNPSLKSRVTISVDTSKNQFSLKLSSVTAADTAVYYCARGKYYETYLGFDVWGQGTLVTVSSASTKGPSVFPLAPSSKSTSGGTAALGCLVKDYFPEPVTVSWNSGALTSGVHTFPAVLQSSGLYSLSSVVTVPSSSLGTQTYICNVNHKPSNTKVDKKVEPKSCDKTHTCPPCPAPELLGGPSVFLFPPKPKDTLYITREPEVTCVVVDVSHEDPEVKFNWYVDGVEVHNAKTKPREEQYGSTYRVVSVLTVLHQDWLNGKEYKCKVSNKALPAPIEKTISKAKGQPREPQVYTLPPSRDELTKNQVSLTCLVKGFYPSDIAVEWESNGQPENNYKTTPPVLDSDGSFFLYSKLTVDKSRWQQGNVFSCSVMHEALHNHYTQKSLSLSPG

SEQ ID NO: 520 - protein, 452 aa, artificial
  Synthetic polypeptide
ELQLQESGPGLVKPSETLSLTCTVSGGSITSSNYYWGWIRQPPGKGLEWIGSIDYTGSTYYNPSLKSRVTISVDTSKNQFSLKLSSVTAADTAVYYCARGKYYETYLGFDVWGQGTLVTVSSASTKGPSVFPLAPSSKSTSGGTAALGCLVKDYFPEPVTVSWNSGALTSGVHTFPAVLQSSGLYSLSSVVTVPSSSLGTQTYICNVNHKPSNTKVDKKVEPKSCDKTHTCPPCPAPELLGGPSVFLFPPKPKDTLYITREPEVTCVVVDVSHEDPEVKFNWYVDGVEVHNAKTKPREEQYGSTYRVVSVLTVLHQDWLNGKEYKCKVSNKALPAPIEKTISKAKGQPREPQVYTLPPSRDELTKNQVSLTCLVKGFYPSDIAVEWESNGQPENNYKTTPPVLDSDGSFFLYSKLTVDKSRWQQGNVFSCSVMHEALHNHYTQKSLSLSPGK

SEQ ID NO: 521 - protein, 452 aa, artificial
  Synthetic polypeptide
ELQLQESGPGLVKPSETLSLTCTVSGGSITSSNYYWGWIRQPPGKGLEWIGSIDYTGSTYYNPSLKSRVTISVDTSKNQFSLKLSSVTAADTAVYYCARGKYYETYLGFDVWGQGTLVTVSSASTKGPSVFPLAPSSKSTSGGTAALGCLVKDYFPEPVTVSWNSGALTSGVHTFPAVLQSSGLYSLSSVVTVPSSSLGTQTYICNVNHKPSNTKVDKKVEPKSCDKTHTCPPCPAPELLGGPSVFLFPPKPKDTLMISRTPEVTCVVVDVSHEDPEVKFNWYVDGVEVHNAKTKPREEQYGSTYRVVSVLTVLHQDWLNGKEYKCKVSNKALPAPIEKTISKAKGQPREPQVYTLPPSRDELTKNQVSLWCLVKGFYPSDIAVEWESNGQPENNYKTTPPVLDSDGSFFLYSKLTVDKSRWQQGNVFSCSVMHEALHNHYTQKSLSLSPGK

SEQ ID NO: 522 - protein, 451 aa, artificial
  Synthetic polypeptide
ELQLQESGPGLVKPSETLSLTCTVSGGSITSSNYYWGWIRQPPGKGLEWIGSIDYTGSTYYNPSLKSRVTISVDTSKNQFSLKLSSVTAADTAVYYCARGKYYETYLGFDVWGQGTLVTVSSASTKGPSVFPLAPSSKSTSGGTAALGCLVKDYFPEPVTVSWNSGALTSGVHTFPAVLQSSGLYSLSSVVTVPSSSLGTQTYICNVNHKPSNTKVDKKVEPKSCDKTHTCPPCPAPELLGGPSVFLFPPKPKDTLYITREPEVTCVVVDVSHEDPEVKFNWYVDGVEVHNAKTKPREEQYGSTYRVVSVLTVLHQDWLNGKEYKCKVSNKALPAPIEKTISKAKGQPREPQVYTLPPSRDELTKNQVSLWCLVKGFYPSDIAVEWESNGQPENNYKTTPPVLDSDGSFFLYSKLTVDKSRWQQGNVFSCSVMHEALHNHYTQKSLSLSPG

SEQ ID NO: 523 - protein, 452 aa, artificial
  Synthetic polypeptide
ELQLQESGPGLVKPSETLSLTCTVSGGSITSSNYYWGWIRQPPGKGLEWIGSIDYTGSTYYNPSLKSRVTISVDTSKNQFSLKLSSVTAADTAVYYCARGKYYETYLGFDVWGQGTLVTVSSASTKGPSVFPLAPSSKSTSGGTAALGCLVKDYFPEPVTVSWNSGALTSGVHTFPAVLQSSGLYSLSSVVTVPSSSLGTQTYICNVNHKPSNTKVDKKVEPKSCDKTHTCPPCPAPELLGGPSVFLFPPKPKDTLYITREPEVTCVVVDVSHEDPEVKFNWYVDGVEVHNAKTKPREEQYGSTYRVVSVLTVLHQDWLNGKEYKCKVSNKALPAPIEKTISKAKGQPREPQVYTLPPSRDELTKNQVSLWCLVKGFYPSDIAVEWESNGQPENNYKTTPPVLDSDGSFFLYSKLTVDKSRWQQGNVFSCSVMHEALHNHYTQKSLSLSPGK

SEQ ID NO: 524 - protein, 452 aa, artificial
  Synthetic polypeptide
ELQLQESGPGLVKPSETLSLTCTVSGGSITSSNYYWGWIRQPPGKGLEWIGSIDYTGSTYYNPSLKSRVTISVDTSKNQFSLKLSSVTAADTAVYYCARGKYYETYLGFDVWGQGTLVTVSSASTKGPSVFPLAPSSKSTSGGTAALGCLVKDYFPEPVTVSWNSGALTSGVHTFPAVLQSSGLYSLSSVVTVPSSSLGTQTYICNVNHKPSNTKVDKKVEPKSCDKTHTCPPCPAPELLGGPSVFLFPPKPKDTLMISRTPEVTCVVVDVSHEDPEVKFNWYVDGVEVHNAKTKPREEQYGSTYRVVSVLTVLHQDWLNGKEYKCKVSNKALPAPIEKTISKAKGQPREPQVYTLPPSRDELTKNQVSLSCAVKGFYPSDIAVEWESNGQPENNYKTTPPVLDSDGSFFLVSKLTVDKSRWQQGNVFSCSVMHEALHNHYTQKSLSLSPGK

SEQ ID NO: 525 - protein, 451 aa, artificial
  Synthetic polypeptide
ELQLQESGPGLVKPSETLSLTCTVSGGSITSSNYYWGWIRQPPGKGLEWIGSIDYTGSTYYNPSLKSRVTISVDTSKNQFSLKLSSVTAADTAVYYCARGKYYETYLGFDVWGQGTLVTVSSASTKGPSVFPLAPSSKSTSGGTAALGCLVKDYFPEPVTVSWNSGALTSGVHTFPAVLQSSGLYSLSSVVTVPSSSLGTQTYICNVNHKPSNTKVDKKVEPKSCDKTHTCPPCPAPELLGGPSVFLFPPKPKDTLYITREPEVTCVVVDVSHEDPEVKFNWYVDGVEVHNAKTKPREEQYGSTYRVVSVLTVLHQDWLNGKEYKCKVSNKALPAPIEKTISKAKGQPREPQVYTLPPSRDELTKNQVSLSCAVKGFYPSDIAVEWESNGQPENNYKTTPPVLDSDGSFFLVSKLTVDKSRWQQGNVFSCSVMHEALHNHYTQKSLSLSPG

SEQ ID NO: 526 - protein, 452 aa, artificial
  Synthetic polypeptide
ELQLQESGPGLVKPSETLSLTCTVSGGSITSSNYYWGWIRQPPGKGLEWIGSIDYTGSTYYNPSLKSRVTISVDTSKNQFSLKLSSVTAADTAVYYCARGKYYETYLGFDVWGQGTLVTVSSASTKGPSVFPLAPSSKSTSGGTAALGCLVKDYFPEPVTVSWNSGALTSGVHTFPAVLQSSGLYSLSSVVTVPSSSLGTQTYICNVNHKPSNTKVDKKVEPKSCDKTHTCPPCPAPELLGGPSVFLFPPKPKDTLYITREPEVTCVVVDVSHEDPEVKFNWYVDGVEVHNAKTKPREEQYGSTYRVVSVLTVLHQDWLNGKEYKCKVSNKALPAPIEKTISKAKGQPREPQVYTLPPSRDELTKNQVSLSCAVKGFYPSDIAVEWESNGQPENNYKTTPPVLDSDGSFFLVSKLTVDKSRWQQGNVFSCSVMHEALHNHYTQKSLSLSPGK

SEQ ID NO: 527 - protein, 452 aa, artificial
  Synthetic polypeptide
ELQLQESGPGLVKPSETLSLTCTVSGGSITSTNYYWGWIRQPPGKGLEWIGNIDYTGSTYYNASLKSRVTISVDTSKNQFSLKLSSVTAADTAVYYCATGKYYETYLGFDVWGQGTLVTVSSASTKGPSVFPLAPSSKSTSGGTAALGCLVKDYFPEPVTVSWNSGALTSGVHTFPAVLQSSGLYSLSSVVTVPSSSLGTQTYICNVNHKPSNTKVDKKVEPKSCDKTHTCPPCPAPELLGGPSVFLFPPKPKDTLMISRTPEVTCVVVDVSHEDPEVKFNWYVDGVEVHNAKTKPREEQYGSTYRVVSVLTVLHQDWLNGKEYKCKVSNKALPAPIEKTISKAKGQPREPQVYTLPPSRDELTKNQVSLTCLVKGFYPSDIAVEWESNGQPENNYKTTPPVLDSDGSFFLYSKLTVDKSRWQQGNVFSCSVMHEALHNHYTQKSLSLSPGK

SEQ ID NO: 528 - protein, 451 aa, artificial
  Synthetic polypeptide
ELQLQESGPGLVKPSETLSLTCTVSGGSITSTNYYWGWIRQPPGKGLEWIGNIDYTGSTYYNASLKSRVTISVDTSKNQFSLKLSSVTAADTAVYYCATGKYYETYLGFDVWGQGTLVTVSSASTKGPSVFPLAPSSKSTSGGTAALGCLVKDYFPEPVTVSWNSGALTSGVHTFPAVLQSSGLYSLSSVVTVPSSSLGTQTYICNVNHKPSNTKVDKKVEPKSCDKTHTCPPCPAPELLGGPSVFLFPPKPKDTLYITREPEVTCVVVDVSHEDPEVKFNWYVDGVEVHNAKTKPREEQYGSTYRVVSVLTVLHQDWLNGKEYKCKVSNKALPAPIEKTISKAKGQPREPQVYTLPPSRDELTKNQVSLTCLVKGFYPSDIAVEWESNGQPENNYKTTPPVLDSDGSFFLYSKLTVDKSRWQQGNVFSCSVMHEALHNHYTQKSLSLSPG

SEQ ID NO: 529 - protein, 452 aa, artificial
  Synthetic polypeptide
ELQLQESGPGLVKPSETLSLTCTVSGGSITSTNYYWGWIRQPPGKGLEWIGNIDYTGSTYYNASLKSRVTISVDTSKNQFSLKLSSVTAADTAVYYCATGKYYETYLGFDVWGQGTLVTVSSASTKGPSVFPLAPSSKSTSGGTAALGCLVKDYFPEPVTVSWNSGALTSGVHTFPAVLQSSGLYSLSSVVTVPSSSLGTQTYICNVNHKPSNTKVDKKVEPKSCDKTHTCPPCPAPELLGGPSVFLFPPKPKDTLYITREPEVTCVVVDVSHEDPEVKFNWYVDGVEVHNAKTKPREEQYGSTYRVVSVLTVLHQDWLNGKEYKCKVSNKALPAPIEKTISKAKGQPREPQVYTLPPSRDELTKNQVSLTCLVKGFYPSDIAVEWESNGQPENNYKTTPPVLDSDGSFFLYSKLTVDKSRWQQGNVFSCSVMHEALHNHYTQKSLSLSPGK

SEQ ID NO: 530 - protein, 452 aa, artificial
  Synthetic polypeptide
ELQLQESGPGLVKPSETLSLTCTVSGGSITSTNYYWGWIRQPPGKGLEWIGNIDYTGSTYYNASLKSRVTISVDTSKNQFSLKLSSVTAADTAVYYCATGKYYETYLGFDVWGQGTLVTVSSASTKGPSVFPLAPSSKSTSGGTAALGCLVKDYFPEPVTVSWNSGALTSGVHTFPAVLQSSGLYSLSSVVTVPSSSLGTQTYICNVNHKPSNTKVDKKVEPKSCDKTHTCPPCPAPELLGGPSVFLFPPKPKDTLMISRTPEVTCVVVDVSHEDPEVKFNWYVDGVEVHNAKTKPREEQYGSTYRVVSVLTVLHQDWLNGKEYKCKVSNKALPAPIEKTISKAKGQPREPQVYTLPPSRDELTKNQVSLWCLVKGFYPSDIAVEWESNGQPENNYKTTPPVLDSDGSFFLYSKLTVDKSRWQQGNVFSCSVMHEALHNHYTQKSLSLSPGK

SEQ ID NO: 531 - protein, 451 aa, artificial
  Synthetic polypeptide
ELQLQESGPGLVKPSETLSLTCTVSGGSITSTNYYWGWIRQPPGKGLEWIGNIDYTGSTYYNASLKSRVTISVDTSKNQFSLKLSSVTAADTAVYYCATGKYYETYLGFDVWGQGTLVTVSSASTKGPSVFPLAPSSKSTSGGTAALGCLVKDYFPEPVTVSWNSGALTSGVHTFPAVLQSSGLYSLSSVVTVPSSSLGTQTYICNVNHKPSNTKVDKKVEPKSCDKTHTCPPCPAPELLGGPSVFLFPPKPKDTLYITREPEVTCVVVDVSHEDPEVKFNWYVDGVEVHNAKTKPREEQYGSTYRVVSVLTVLHQDWLNGKEYKCKVSNKALPAPIEKTISKAKGQPREPQVYTLPPSRDELTKNQVSLWCLVKGFYPSDIAVEWESNGQPENNYKTTPPVLDSDGSFFLYSKLTVDKSRWQQGNVFSCSVMHEALHNHYTQKSLSLSPG

SEQ ID NO: 532 - protein, 452 aa, artificial
  Synthetic polypeptide
ELQLQESGPGLVKPSETLSLTCTVSGGSITSTNYYWGWIRQPPGKGLEWIGNIDYTGSTYYNASLKSRVTISVDTSKNQFSLKLSSVTAADTAVYYCATGKYYETYLGFDVWGQGTLVTVSSASTKGPSVFPLAPSSKSTSGGTAALGCLVKDYFPEPVTVSWNSGALTSGVHTFPAVLQSSGLYSLSSVVTVPSSSLGTQTYICNVNHKPSNTKVDKKVEPKSCDKTHTCPPCPAPELLGGPSVFLFPPKPKDTLYITREPEVTCVVVDVSHEDPEVKFNWYVDGVEVHNAKTKPREEQYGSTYRVVSVLTVLHQDWLNGKEYKCKVSNKALPAPIEKTISKAKGQPREPQVYTLPPSRDELTKNQVSLWCLVKGFYPSDIAVEWESNGQPENNYKTTPPVLDSDGSFFLYSKLTVDKSRWQQGNVFSCSVMHEALHNHYTQKSLSLSPGK

SEQ ID NO: 533 - protein, 452 aa, artificial
  Synthetic polypeptide
ELQLQESGPGLVKPSETLSLTCTVSGGSITSTNYYWGWIRQPPGKGLEWIGNIDYTGSTYYNASLKSRVTISVDTSKNQFSLKLSSVTAADTAVYYCATGKYYETYLGFDVWGQGTLVTVSSASTKGPSVFPLAPSSKSTSGGTAALGCLVKDYFPEPVTVSWNSGALTSGVHTFPAVLQSSGLYSLSSVVTVPSSSLGTQTYICNVNHKPSNTKVDKKVEPKSCDKTHTCPPCPAPELLGGPSVFLFPPKPKDTLMISRTPEVTCVVVDVSHEDPEVKFNWYVDGVEVHNAKTKPREEQYGSTYRVVSVLTVLHQDWLNGKEYKCKVSNKALPAPIEKTISKAKGQPREPQVYTLPPSRDELTKNQVSLSCAVKGFYPSDIAVEWESNGQPENNYKTTPPVLDSDGSFFLVSKLTVDKSRWQQGNVFSCSVMHEALHNHYTQKSLSLSPGK

SEQ ID NO: 534 - protein, 451 aa, artificial
  Synthetic polypeptide
ELQLQESGPGLVKPSETLSLTCTVSGGSITSTNYYWGWIRQPPGKGLEWIGNIDYTGSTYYNASLKSRVTISVDTSKNQFSLKLSSVTAADTAVYYCATGKYYETYLGFDVWGQGTLVTVSSASTKGPSVFPLAPSSKSTSGGTAALGCLVKDYFPEPVTVSWNSGALTSGVHTFPAVLQSSGLYSLSSVVTVPSSSLGTQTYICNVNHKPSNTKVDKKVEPKSCDKTHTCPPCPAPELLGGPSVFLFPPKPKDTLYITREPEVTCVVVDVSHEDPEVKFNWYVDGVEVHNAKTKPREEQYGSTYRVVSVLTVLHQDWLNGKEYKCKVSNKALPAPIEKTISKAKGQPREPQVYTLPPSRDELTKNQVSLSCAVKGFYPSDIAVEWESNGQPENNYKTTPPVLDSDGSFFLVSKLTVDKSRWQQGNVFSCSVMHEALHNHYTQKSLSLSPG

SEQ ID NO: 535 - protein, 452 aa, artificial
  Synthetic polypeptide
ELQLQESGPGLVKPSETLSLTCTVSGGSITSTNYYWGWIRQPPGKGLEWIGNIDYTGSTYYNASLKSRVTISVDTSKNQFSLKLSSVTAADTAVYYCATGKYYETYLGFDVWGQGTLVTVSSASTKGPSVFPLAPSSKSTSGGTAALGCLVKDYFPEPVTVSWNSGALTSGVHTFPAVLQSSGLYSLSSVVTVPSSSLGTQTYICNVNHKPSNTKVDKKVEPKSCDKTHTCPPCPAPELLGGPSVFLFPPKPKDTLYITREPEVTCVVVDVSHEDPEVKFNWYVDGVEVHNAKTKPREEQYGSTYRVVSVLTVLHQDWLNGKEYKCKVSNKALPAPIEKTISKAKGQPREPQVYTLPPSRDELTKNQVSLSCAVKGFYPSDIAVEWESNGQPENNYKTTPPVLDSDGSFFLVSKLTVDKSRWQQGNVFSCSVMHEALHNHYTQKSLSLSPGK

SEQ ID NO: 536 - protein, 452 aa, artificial
  Synthetic polypeptide
ELQLQESGPGLVKPSETLSLTCTVSGGSITSSNAYWGWIRQPPGKGLEWIGSIDYTGSTAYNPSLKSRVTISVDTSKNQFSLKLSSVTAADTAVYYCAHGKYYETYLGFDVWGQGTLVTVSSASTKGPSVFPLAPSSKSTSGGTAALGCLVKDYFPEPVTVSWNSGALTSGVHTFPAVLQSSGLYSLSSVVTVPSSSLGTQTYICNVNHKPSNTKVDKKVEPKSCDKTHTCPPCPAPELLGGPSVFLFPPKPKDTLMISRTPEVTCVVVDVSHEDPEVKFNWYVDGVEVHNAKTKPREEQYGSTYRVVSVLTVLHQDWLNGKEYKCKVSNKALPAPIEKTISKAKGQPREPQVYTLPPSRDELTKNQVSLTCLVKGFYPSDIAVEWESNGQPENNYKTTPPVLDSDGSFFLYSKLTVDKSRWQQGNVFSCSVMHEALHNHYTQKSLSLSPGK

SEQ ID NO: 537 - protein, 451 aa, artificial
  Synthetic polypeptide
ELQLQESGPGLVKPSETLSLTCTVSGGSITSSNAYWGWIRQPPGKGLEWIGSIDYTGSTAYNPSLKSRVTISVDTSKNQFSLKLSSVTAADTAVYYCAHGKYYETYLGFDVWGQGTLVTVSSASTKGPSVFPLAPSSKSTSGGTAALGCLVKDYFPEPVTVSWNSGALTSGVHTFPAVLQSSGLYSLSSVVTVPSSSLGTQTYICNVNHKPSNTKVDKKVEPKSCDKTHTCPPCPAPELLGGPSVFLFPPKPKDTLYITREPEVTCVVVDVSHEDPEVKFNWYVDGVEVHNAKTKPREEQYGSTYRVVSVLTVLHQDWLNGKEYKCKVSNKALPAPIEKTISKAKGQPREPQVYTLPPSRDELTKNQVSLTCLVKGFYPSDIAVEWESNGQPENNYKTTPPVLDSDGSFFLYSKLTVDKSRWQQGNVFSCSVMHEALHNHYTQKSLSLSPG

SEQ ID NO: 538 - protein, 452 aa, artificial
  Synthetic polypeptide
ELQLQESGPGLVKPSETLSLTCTVSGGSITSSNAYWGWIRQPPGKGLEWIGSIDYTGSTAYNPSLKSRVTISVDTSKNQFSLKLSSVTAADTAVYYCAHGKYYETYLGFDVWGQGTLVTVSSASTKGPSVFPLAPSSKSTSGGTAALGCLVKDYFPEPVTVSWNSGALTSGVHTFPAVLQSSGLYSLSSVVTVPSSSLGTQTYICNVNHKPSNTKVDKKVEPKSCDKTHTCPPCPAPELLGGPSVFLFPPKPKDTLYITREPEVTCVVVDVSHEDPEVKFNWYVDGVEVHNAKTKPREEQYGSTYRVVSVLTVLHQDWLNGKEYKCKVSNKALPAPIEKTISKAKGQPREPQVYTLPPSRDELTKNQVSLTCLVKGFYPSDIAVEWESNGQPENNYKTTPPVLDSDGSFFLYSKLTVDKSRWQQGNVFSCSVMHEALHNHYTQKSLSLSPGK

SEQ ID NO: 539 - protein, 452 aa, artificial
  Synthetic polypeptide
ELQLQESGPGLVKPSETLSLTCTVSGGSITSSNAYWGWIRQPPGKGLEWIGSIDYTGSTAYNPSLKSRVTISVDTSKNQFSLKLSSVTAADTAVYYCAHGKYYETYLGFDVWGQGTLVTVSSASTKGPSVFPLAPSSKSTSGGTAALGCLVKDYFPEPVTVSWNSGALTSGVHTFPAVLQSSGLYSLSSVVTVPSSSLGTQTYICNVNHKPSNTKVDKKVEPKSCDKTHTCPPCPAPELLGGPSVFLFPPKPKDTLMISRTPEVTCVVVDVSHEDPEVKFNWYVDGVEVHNAKTKPREEQYGSTYRVVSVLTVLHQDWLNGKEYKCKVSNKALPAPIEKTISKAKGQPREPQVYTLPPSRDELTKNQVSLWCLVKGFYPSDIAVEWESNGQPENNYKTTPPVLDSDGSFFLYSKLTVDKSRWQQGNVFSCSVMHEALHNHYTQKSLSLSPGK

SEQ ID NO: 540 - protein, 451 aa, artificial
  Synthetic polypeptide
ELQLQESGPGLVKPSETLSLTCTVSGGSITSSNAYWGWIRQPPGKGLEWIGSIDYTGSTAYNPSLKSRVTISVDTSKNQFSLKLSSVTAADTAVYYCAHGKYYETYLGFDVWGQGTLVTVSSASTKGPSVFPLAPSSKSTSGGTAALGCLVKDYFPEPVTVSWNSGALTSGVHTFPAVLQSSGLYSLSSVVTVPSSSLGTQTYICNVNHKPSNTKVDKKVEPKSCDKTHTCPPCPAPELLGGPSVFLFPPKPKDTLYITREPEVTCVVVDVSHEDPEVKFNWYVDGVEVHNAKTKPREEQYGSTYRVVSVLTVLHQDWLNGKEYKCKVSNKALPAPIEKTISKAKGQPREPQVYTLPPSRDELTKNQVSLWCLVKGFYPSDIAVEWESNGQPENNYKTTPPVLDSDGSFFLYSKLTVDKSRWQQGNVFSCSVMHEALHNHYTQKSLSLSPG

SEQ ID NO: 541 - protein, 452 aa, artificial
  Synthetic polypeptide
ELQLQESGPGLVKPSETLSLTCTVSGGSITSSNAYWGWIRQPPGKGLEWIGSIDYTGSTAYNPSLKSRVTISVDTSKNQFSLKLSSVTAADTAVYYCAHGKYYETYLGFDVWGQGTLVTVSSASTKGPSVFPLAPSSKSTSGGTAALGCLVKDYFPEPVTVSWNSGALTSGVHTFPAVLQSSGLYSLSSVVTVPSSSLGTQTYICNVNHKPSNTKVDKKVEPKSCDKTHTCPPCPAPELLGGPSVFLFPPKPKDTLYITREPEVTCVVVDVSHEDPEVKFNWYVDGVEVHNAKTKPREEQYGSTYRVVSVLTVLHQDWLNGKEYKCKVSNKALPAPIEKTISKAKGQPREPQVYTLPPSRDELTKNQVSLWCLVKGFYPSDIAVEWESNGQPENNYKTTPPVLDSDGSFFLYSKLTVDKSRWQQGNVFSCSVMHEALHNHYTQKSLSLSPGK

SEQ ID NO: 542 - protein, 452 aa, artificial
  Synthetic polypeptide
ELQLQESGPGLVKPSETLSLTCTVSGGSITSSNAYWGWIRQPPGKGLEWIGSIDYTGSTAYNPSLKSRVTISVDTSKNQFSLKLSSVTAADTAVYYCAHGKYYETYLGFDVWGQGTLVTVSSASTKGPSVFPLAPSSKSTSGGTAALGCLVKDYFPEPVTVSWNSGALTSGVHTFPAVLQSSGLYSLSSVVTVPSSSLGTQTYICNVNHKPSNTKVDKKVEPKSCDKTHTCPPCPAPELLGGPSVFLFPPKPKDTLMISRTPEVTCVVVDVSHEDPEVKFNWYVDGVEVHNAKTKPREEQYGSTYRVVSVLTVLHQDWLNGKEYKCKVSNKALPAPIEKTISKAKGQPREPQVYTLPPSRDELTKNQVSLSCAVKGFYPSDIAVEWESNGQPENNYKTTPPVLDSDGSFFLVSKLTVDKSRWQQGNVFSCSVMHEALHNHYTQKSLSLSPGK

SEQ ID NO: 543 - protein, 451 aa, artificial
  Synthetic polypeptide
ELQLQESGPGLVKPSETLSLTCTVSGGSITSSNAYWGWIRQPPGKGLEWIGSIDYTGSTAYNPSLKSRVTISVDTSKNQFSLKLSSVTAADTAVYYCAHGKYYETYLGFDVWGQGTLVTVSSASTKGPSVFPLAPSSKSTSGGTAALGCLVKDYFPEPVTVSWNSGALTSGVHTFPAVLQSSGLYSLSSVVTVPSSSLGTQTYICNVNHKPSNTKVDKKVEPKSCDKTHTCPPCPAPELLGGPSVFLFPPKPKDTLYITREPEVTCVVVDVSHEDPEVKFNWYVDGVEVHNAKTKPREEQYGSTYRVVSVLTVLHQDWLNGKEYKCKVSNKALPAPIEKTISKAKGQPREPQVYTLPPSRDELTKNQVSLSCAVKGFYPSDIAVEWESNGQPENNYKTTPPVLDSDGSFFLVSKLTVDKSRWQQGNVFSCSVMHEALHNHYTQKSLSLSPG

SEQ ID NO: 544 - protein, 452 aa, artificial
  Synthetic polypeptide
ELQLQESGPGLVKPSETLSLTCTVSGGSITSSNAYWGWIRQPPGKGLEWIGSIDYTGSTAYNPSLKSRVTISVDTSKNQFSLKLSSVTAADTAVYYCAHGKYYETYLGFDVWGQGTLVTVSSASTKGPSVFPLAPSSKSTSGGTAALGCLVKDYFPEPVTVSWNSGALTSGVHTFPAVLQSSGLYSLSSVVTVPSSSLGTQTYICNVNHKPSNTKVDKKVEPKSCDKTHTCPPCPAPELLGGPSVFLFPPKPKDTLYITREPEVTCVVVDVSHEDPEVKFNWYVDGVEVHNAKTKPREEQYGSTYRVVSVLTVLHQDWLNGKEYKCKVSNKALPAPIEKTISKAKGQPREPQVYTLPPSRDELTKNQVSLSCAVKGFYPSDIAVEWESNGQPENNYKTTPPVLDSDGSFFLVSKLTVDKSRWQQGNVFSCSVMHEALHNHYTQKSLSLSPGK

SEQ ID NO: 545 - protein, 452 aa, artificial
  Synthetic polypeptide
ELQLQESGPGLVKPSETLSLTCTVSGGSITASNYYWGWIRQPPGKGLEWIGSIDYTGSTYYNTSLKSRVTISVDTSKNQFSLKLSSVTAADTAVYYCATGKYYETYLGFDVWGQGTLVTVSSASTKGPSVFPLAPSSKSTSGGTAALGCLVKDYFPEPVTVSWNSGALTSGVHTFPAVLQSSGLYSLSSVVTVPSSSLGTQTYICNVNHKPSNTKVDKKVEPKSCDKTHTCPPCPAPELLGGPSVFLFPPKPKDTLMISRTPEVTCVVVDVSHEDPEVKFNWYVDGVEVHNAKTKPREEQYGSTYRVVSVLTVLHQDWLNGKEYKCKVSNKALPAPIEKTISKAKGQPREPQVYTLPPSRDELTKNQVSLTCLVKGFYPSDIAVEWESNGQPENNYKTTPPVLDSDGSFFLYSKLTVDKSRWQQGNVFSCSVMHEALHNHYTQKSLSLSPGK

SEQ ID NO: 546 - protein, 451 aa, artificial
  Synthetic polypeptide
ELQLQESGPGLVKPSETLSLTCTVSGGSITASNYYWGWIRQPPGKGLEWIGSIDYTGSTYYNTSLKSRVTISVDTSKNQFSLKLSSVTAADTAVYYCATGKYYETYLGFDVWGQGTLVTVSSASTKGPSVFPLAPSSKSTSGGTAALGCLVKDYFPEPVTVSWNSGALTSGVHTFPAVLQSSGLYSLSSVVTVPSSSLGTQTYICNVNHKPSNTKVDKKVEPKSCDKTHTCPPCPAPELLGGPSVFLFPPKPKDTLYITREPEVTCVVVDVSHEDPEVKFNWYVDGVEVHNAKTKPREEQYGSTYRVVSVLTVLHQDWLNGKEYKCKVSNKALPAPIEKTISKAKGQPREPQVYTLPPSRDELTKNQVSLTCLVKGFYPSDIAVEWESNGQPENNYKTTPPVLDSDGSFFLYSKLTVDKSRWQQGNVFSCSVMHEALHNHYTQKSLSLSPG

SEQ ID NO: 547 - protein, 452 aa, artificial
  Synthetic polypeptide
ELQLQESGPGLVKPSETLSLTCTVSGGSITASNYYWGWIRQPPGKGLEWIGSIDYTGSTYYNTSLKSRVTISVDTSKNQFSLKLSSVTAADTAVYYCATGKYYETYLGFDVWGQGTLVTVSSASTKGPSVFPLAPSSKSTSGGTAALGCLVKDYFPEPVTVSWNSGALTSGVHTFPAVLQSSGLYSLSSVVTVPSSSLGTQTYICNVNHKPSNTKVDKKVEPKSCDKTHTCPPCPAPELLGGPSVFLFPPKPKDTLYITREPEVTCVVVDVSHEDPEVKFNWYVDGVEVHNAKTKPREEQYGSTYRVVSVLTVLHQDWLNGKEYKCKVSNKALPAPIEKTISKAKGQPREPQVYTLPPSRDELTKNQVSLTCLVKGFYPSDIAVEWESNGQPENNYKTTPPVLDSDGSFFLYSKLTVDKSRWQQGNVFSCSVMHEALHNHYTQKSLSLSPGK

SEQ ID NO: 548 - protein, 452 aa, artificial
  Synthetic polypeptide
ELQLQESGPGLVKPSETLSLTCTVSGGSITASNYYWGWIRQPPGKGLEWIGSIDYTGSTYYNTSLKSRVTISVDTSKNQFSLKLSSVTAADTAVYYCATGKYYETYLGFDVWGQGTLVTVSSASTKGPSVFPLAPSSKSTSGGTAALGCLVKDYFPEPVTVSWNSGALTSGVHTFPAVLQSSGLYSLSSVVTVPSSSLGTQTYICNVNHKPSNTKVDKKVEPKSCDKTHTCPPCPAPELLGGPSVFLFPPKPKDTLMISRTPEVTCVVVDVSHEDPEVKFNWYVDGVEVHNAKTKPREEQYGSTYRVVSVLTVLHQDWLNGKEYKCKVSNKALPAPIEKTISKAKGQPREPQVYTLPPSRDELTKNQVSLWCLVKGFYPSDIAVEWESNGQPENNYKTTPPVLDSDGSFFLYSKLTVDKSRWQQGNVFSCSVMHEALHNHYTQKSLSLSPGK

SEQ ID NO: 549 - protein, 451 aa, artificial
  Synthetic polypeptide
ELQLQESGPGLVKPSETLSLTCTVSGGSITASNYYWGWIRQPPGKGLEWIGSIDYTGSTYYNTSLKSRVTISVDTSKNQFSLKLSSVTAADTAVYYCATGKYYETYLGFDVWGQGTLVTVSSASTKGPSVFPLAPSSKSTSGGTAALGCLVKDYFPEPVTVSWNSGALTSGVHTFPAVLQSSGLYSLSSVVTVPSSSLGTQTYICNVNHKPSNTKVDKKVEPKSCDKTHTCPPCPAPELLGGPSVFLFPPKPKDTLYITREPEVTCVVVDVSHEDPEVKFNWYVDGVEVHNAKTKPREEQYGSTYRVVSVLTVLHQDWLNGKEYKCKVSNKALPAPIEKTISKAKGQPREPQVYTLPPSRDELTKNQVSLWCLVKGFYPSDIAVEWESNGQPENNYKTTPPVLDSDGSFFLYSKLTVDKSRWQQGNVFSCSVMHEALHNHYTQKSLSLSPG

SEQ ID NO: 550 - protein, 452 aa, artificial
  Synthetic polypeptide
ELQLQESGPGLVKPSETLSLTCTVSGGSITASNYYWGWIRQPPGKGLEWIGSIDYTGSTYYNTSLKSRVTISVDTSKNQFSLKLSSVTAADTAVYYCATGKYYETYLGFDVWGQGTLVTVSSASTKGPSVFPLAPSSKSTSGGTAALGCLVKDYFPEPVTVSWNSGALTSGVHTFPAVLQSSGLYSLSSVVTVPSSSLGTQTYICNVNHKPSNTKVDKKVEPKSCDKTHTCPPCPAPELLGGPSVFLFPPKPKDTLYITREPEVTCVVVDVSHEDPEVKFNWYVDGVEVHNAKTKPREEQYGSTYRVVSVLTVLHQDWLNGKEYKCKVSNKALPAPIEKTISKAKGQPREPQVYTLPPSRDELTKNQVSLWCLVKGFYPSDIAVEWESNGQPENNYKTTPPVLDSDGSFFLYSKLTVDKSRWQQGNVFSCSVMHEALHNHYTQKSLSLSPGK

SEQ ID NO: 551 - protein, 452 aa, artificial
  Synthetic polypeptide
ELQLQESGPGLVKPSETLSLTCTVSGGSITASNYYWGWIRQPPGKGLEWIGSIDYTGSTYYNTSLKSRVTISVDTSKNQFSLKLSSVTAADTAVYYCATGKYYETYLGFDVWGQGTLVTVSSASTKGPSVFPLAPSSKSTSGGTAALGCLVKDYFPEPVTVSWNSGALTSGVHTFPAVLQSSGLYSLSSVVTVPSSSLGTQTYICNVNHKPSNTKVDKKVEPKSCDKTHTCPPCPAPELLGGPSVFLFPPKPKDTLMISRTPEVTCVVVDVSHEDPEVKFNWYVDGVEVHNAKTKPREEQYGSTYRVVSVLTVLHQDWLNGKEYKCKVSNKALPAPIEKTISKAKGQPREPQVYTLPPSRDELTKNQVSLSCAVKGFYPSDIAVEWESNGQPENNYKTTPPVLDSDGSFFLVSKLTVDKSRWQQGNVFSCSVMHEALHNHYTQKSLSLSPGK

SEQ ID NO: 552 - protein, 451 aa, artificial
  Synthetic polypeptide
ELQLQESGPGLVKPSETLSLTCTVSGGSITASNYYWGWIRQPPGKGLEWIGSIDYTGSTYYNTSLKSRVTISVDTSKNQFSLKLSSVTAADTAVYYCATGKYYETYLGFDVWGQGTLVTVSSASTKGPSVFPLAPSSKSTSGGTAALGCLVKDYFPEPVTVSWNSGALTSGVHTFPAVLQSSGLYSLSSVVTVPSSSLGTQTYICNVNHKPSNTKVDKKVEPKSCDKTHTCPPCPAPELLGGPSVFLFPPKPKDTLYITREPEVTCVVVDVSHEDPEVKFNWYVDGVEVHNAKTKPREEQYGSTYRVVSVLTVLHQDWLNGKEYKCKVSNKALPAPIEKTISKAKGQPREPQVYTLPPSRDELTKNQVSLSCAVKGFYPSDIAVEWESNGQPENNYKTTPPVLDSDGSFFLVSKLTVDKSRWQQGNVFSCSVMHEALHNHYTQKSLSLSPG

SEQ ID NO: 553 - protein, 452 aa, artificial
  Synthetic polypeptide
ELQLQESGPGLVKPSETLSLTCTVSGGSITASNYYWGWIRQPPGKGLEWIGSIDYTGSTYYNTSLKSRVTISVDTSKNQFSLKLSSVTAADTAVYYCATGKYYETYLGFDVWGQGTLVTVSSASTKGPSVFPLAPSSKSTSGGTAALGCLVKDYFPEPVTVSWNSGALTSGVHTFPAVLQSSGLYSLSSVVTVPSSSLGTQTYICNVNHKPSNTKVDKKVEPKSCDKTHTCPPCPAPELLGGPSVFLFPPKPKDTLYITREPEVTCVVVDVSHEDPEVKFNWYVDGVEVHNAKTKPREEQYGSTYRVVSVLTVLHQDWLNGKEYKCKVSNKALPAPIEKTISKAKGQPREPQVYTLPPSRDELTKNQVSLSCAVKGFYPSDIAVEWESNGQPENNYKTTPPVLDSDGSFFLVSKLTVDKSRWQQGNVFSCSVMHEALHNHYTQKSLSLSPGK

SEQ ID NO: 554 - protein, 452 aa, artificial
  Synthetic polypeptide
ELQLQESGPGLVKPSETLSLTCTVSGGSITASNYYWGWIRQPPGKGLEWIGSIDYTGSTYYNPSLKSRVTISVDTSKNQFSLKLSSVTAADTAVYYCATGKYYETYLGFDVWGQGTLVTVSSASTKGPSVFPLAPSSKSTSGGTAALGCLVKDYFPEPVTVSWNSGALTSGVHTFPAVLQSSGLYSLSSVVTVPSSSLGTQTYICNVNHKPSNTKVDKKVEPKSCDKTHTCPPCPAPELLGGPSVFLFPPKPKDTLMISRTPEVTCVVVDVSHEDPEVKFNWYVDGVEVHNAKTKPREEQYGSTYRVVSVLTVLHQDWLNGKEYKCKVSNKALPAPIEKTISKAKGQPREPQVYTLPPSRDELTKNQVSLTCLVKGFYPSDIAVEWESNGQPENNYKTTPPVLDSDGSFFLYSKLTVDKSRWQQGNVFSCSVMHEALHNHYTQKSLSLSPGK

SEQ ID NO: 555 - protein, 451 aa, artificial
  Synthetic polypeptide
ELQLQESGPGLVKPSETLSLTCTVSGGSITASNYYWGWIRQPPGKGLEWIGSIDYTGSTYYNPSLKSRVTISVDTSKNQFSLKLSSVTAADTAVYYCATGKYYETYLGFDVWGQGTLVTVSSASTKGPSVFPLAPSSKSTSGGTAALGCLVKDYFPEPVTVSWNSGALTSGVHTFPAVLQSSGLYSLSSVVTVPSSSLGTQTYICNVNHKPSNTKVDKKVEPKSCDKTHTCPPCPAPELLGGPSVFLFPPKPKDTLYITREPEVTCVVVDVSHEDPEVKFNWYVDGVEVHNAKTKPREEQYGSTYRVVSVLTVLHQDWLNGKEYKCKVSNKALPAPIEKTISKAKGQPREPQVYTLPPSRDELTKNQVSLTCLVKGFYPSDIAVEWESNGQPENNYKTTPPVLDSDGSFFLYSKLTVDKSRWQQGNVFSCSVMHEALHNHYTQKSLSLSPG

SEQ ID NO: 556 - protein, 452 aa, artificial
  Synthetic polypeptide
ELQLQESGPGLVKPSETLSLTCTVSGGSITASNYYWGWIRQPPGKGLEWIGSIDYTGSTYYNPSLKSRVTISVDTSKNQFSLKLSSVTAADTAVYYCATGKYYETYLGFDVWGQGTLVTVSSASTKGPSVFPLAPSSKSTSGGTAALGCLVKDYFPEPVTVSWNSGALTSGVHTFPAVLQSSGLYSLSSVVTVPSSSLGTQTYICNVNHKPSNTKVDKKVEPKSCDKTHTCPPCPAPELLGGPSVFLFPPKPKDTLYITREPEVTCVVVDVSHEDPEVKFNWYVDGVEVHNAKTKPREEQYGSTYRVVSVLTVLHQDWLNGKEYKCKVSNKALPAPIEKTISKAKGQPREPQVYTLPPSRDELTKNQVSLTCLVKGFYPSDIAVEWESNGQPENNYKTTPPVLDSDGSFFLYSKLTVDKSRWQQGNVFSCSVMHEALHNHYTQKSLSLSPGK

SEQ ID NO: 557 - protein, 452 aa, artificial
  Synthetic polypeptide
ELQLQESGPGLVKPSETLSLTCTVSGGSITASNYYWGWIRQPPGKGLEWIGSIDYTGSTYYNPSLKSRVTISVDTSKNQFSLKLSSVTAADTAVYYCATGKYYETYLGFDVWGQGTLVTVSSASTKGPSVFPLAPSSKSTSGGTAALGCLVKDYFPEPVTVSWNSGALTSGVHTFPAVLQSSGLYSLSSVVTVPSSSLGTQTYICNVNHKPSNTKVDKKVEPKSCDKTHTCPPCPAPELLGGPSVFLFPPKPKDTLMISRTPEVTCVVVDVSHEDPEVKFNWYVDGVEVHNAKTKPREEQYGSTYRVVSVLTVLHQDWLNGKEYKCKVSNKALPAPIEKTISKAKGQPREPQVYTLPPSRDELTKNQVSLWCLVKGFYPSDIAVEWESNGQPENNYKTTPPVLDSDGSFFLYSKLTVDKSRWQQGNVFSCSVMHEALHNHYTQKSLSLSPGK

SEQ ID NO: 558 - protein, 451 aa, artificial
  Synthetic polypeptide
ELQLQESGPGLVKPSETLSLTCTVSGGSITASNYYWGWIRQPPGKGLEWIGSIDYTGSTYYNPSLKSRVTISVDTSKNQFSLKLSSVTAADTAVYYCATGKYYETYLGFDVWGQGTLVTVSSASTKGPSVFPLAPSSKSTSGGTAALGCLVKDYFPEPVTVSWNSGALTSGVHTFPAVLQSSGLYSLSSVVTVPSSSLGTQTYICNVNHKPSNTKVDKKVEPKSCDKTHTCPPCPAPELLGGPSVFLFPPKPKDTLYITREPEVTCVVVDVSHEDPEVKFNWYVDGVEVHNAKTKPREEQYGSTYRVVSVLTVLHQDWLNGKEYKCKVSNKALPAPIEKTISKAKGQPREPQVYTLPPSRDELTKNQVSLWCLVKGFYPSDIAVEWESNGQPENNYKTTPPVLDSDGSFFLYSKLTVDKSRWQQGNVFSCSVMHEALHNHYTQKSLSLSPG

SEQ ID NO: 559 - protein, 452 aa, artificial
  Synthetic polypeptide
ELQLQESGPGLVKPSETLSLTCTVSGGSITASNYYWGWIRQPPGKGLEWIGSIDYTGSTYYNPSLKSRVTISVDTSKNQFSLKLSSVTAADTAVYYCATGKYYETYLGFDVWGQGTLVTVSSASTKGPSVFPLAPSSKSTSGGTAALGCLVKDYFPEPVTVSWNSGALTSGVHTFPAVLQSSGLYSLSSVVTVPSSSLGTQTYICNVNHKPSNTKVDKKVEPKSCDKTHTCPPCPAPELLGGPSVFLFPPKPKDTLYITREPEVTCVVVDVSHEDPEVKFNWYVDGVEVHNAKTKPREEQYGSTYRVVSVLTVLHQDWLNGKEYKCKVSNKALPAPIEKTISKAKGQPREPQVYTLPPSRDELTKNQVSLWCLVKGFYPSDIAVEWESNGQPENNYKTTPPVLDSDGSFFLYSKLTVDKSRWQQGNVFSCSVMHEALHNHYTQKSLSLSPGK

SEQ ID NO: 560 - protein, 452 aa, artificial
  Synthetic polypeptide
ELQLQESGPGLVKPSETLSLTCTVSGGSITASNYYWGWIRQPPGKGLEWIGSIDYTGSTYYNPSLKSRVTISVDTSKNQFSLKLSSVTAADTAVYYCATGKYYETYLGFDVWGQGTLVTVSSASTKGPSVFPLAPSSKSTSGGTAALGCLVKDYFPEPVTVSWNSGALTSGVHTFPAVLQSSGLYSLSSVVTVPSSSLGTQTYICNVNHKPSNTKVDKKVEPKSCDKTHTCPPCPAPELLGGPSVFLFPPKPKDTLMISRTPEVTCVVVDVSHEDPEVKFNWYVDGVEVHNAKTKPREEQYGSTYRVVSVLTVLHQDWLNGKEYKCKVSNKALPAPIEKTISKAKGQPREPQVYTLPPSRDELTKNQVSLSCAVKGFYPSDIAVEWESNGQPENNYKTTPPVLDSDGSFFLVSKLTVDKSRWQQGNVFSCSVMHEALHNHYTQKSLSLSPGK

SEQ ID NO: 561 - protein, 451 aa, artificial
  Synthetic polypeptide
ELQLQESGPGLVKPSETLSLTCTVSGGSITASNYYWGWIRQPPGKGLEWIGSIDYTGSTYYNPSLKSRVTISVDTSKNQFSLKLSSVTAADTAVYYCATGKYYETYLGFDVWGQGTLVTVSSASTKGPSVFPLAPSSKSTSGGTAALGCLVKDYFPEPVTVSWNSGALTSGVHTFPAVLQSSGLYSLSSVVTVPSSSLGTQTYICNVNHKPSNTKVDKKVEPKSCDKTHTCPPCPAPELLGGPSVFLFPPKPKDTLYITREPEVTCVVVDVSHEDPEVKFNWYVDGVEVHNAKTKPREEQYGSTYRVVSVLTVLHQDWLNGKEYKCKVSNKALPAPIEKTISKAKGQPREPQVYTLPPSRDELTKNQVSLSCAVKGFYPSDIAVEWESNGQPENNYKTTPPVLDSDGSFFLVSKLTVDKSRWQQGNVFSCSVMHEALHNHYTQKSLSLSPG

SEQ ID NO: 562 - protein, 452 aa, artificial
  Synthetic polypeptide
ELQLQESGPGLVKPSETLSLTCTVSGGSITASNYYWGWIRQPPGKGLEWIGSIDYTGSTYYNPSLKSRVTISVDTSKNQFSLKLSSVTAADTAVYYCATGKYYETYLGFDVWGQGTLVTVSSASTKGPSVFPLAPSSKSTSGGTAALGCLVKDYFPEPVTVSWNSGALTSGVHTFPAVLQSSGLYSLSSVVTVPSSSLGTQTYICNVNHKPSNTKVDKKVEPKSCDKTHTCPPCPAPELLGGPSVFLFPPKPKDTLYITREPEVTCVVVDVSHEDPEVKFNWYVDGVEVHNAKTKPREEQYGSTYRVVSVLTVLHQDWLNGKEYKCKVSNKALPAPIEKTISKAKGQPREPQVYTLPPSRDELTKNQVSLSCAVKGFYPSDIAVEWESNGQPENNYKTTPPVLDSDGSFFLVSKLTVDKSRWQQGNVFSCSVMHEALHNHYTQKSLSLSPGK

SEQ ID NO: 563 - protein, 452 aa, artificial
  Synthetic polypeptide
ELQLQESGPGLVKPSETLSLTCTVSGGSITASNYYWGWIRQPPGKGLEWIGSIDYTGSTYYEPSLKSRVTISVDTSKNQFSLKLSSVTAADTAVYYCATGSYYETYLGFDVWGQGTLVTVSSASTKGPSVFPLAPSSKSTSGGTAALGCLVKDYFPEPVTVSWNSGALTSGVHTFPAVLQSSGLYSLSSVVTVPSSSLGTQTYICNVNHKPSNTKVDKKVEPKSCDKTHTCPPCPAPELLGGPSVFLFPPKPKDTLMISRTPEVTCVVVDVSHEDPEVKFNWYVDGVEVHNAKTKPREEQYGSTYRVVSVLTVLHQDWLNGKEYKCKVSNKALPAPIEKTISKAKGQPREPQVYTLPPSRDELTKNQVSLTCLVKGFYPSDIAVEWESNGQPENNYKTTPPVLDSDGSFFLYSKLTVDKSRWQQGNVFSCSVMHEALHNHYTQKSLSLSPGK

SEQ ID NO: 564 - protein, 451 aa, artificial
  Synthetic polypeptide
ELQLQESGPGLVKPSETLSLTCTVSGGSITASNYYWGWIRQPPGKGLEWIGSIDYTGSTYYEPSLKSRVTISVDTSKNQFSLKLSSVTAADTAVYYCATGSYYETYLGFDVWGQGTLVTVSSASTKGPSVFPLAPSSKSTSGGTAALGCLVKDYFPEPVTVSWNSGALTSGVHTFPAVLQSSGLYSLSSVVTVPSSSLGTQTYICNVNHKPSNTKVDKKVEPKSCDKTHTCPPCPAPELLGGPSVFLFPPKPKDTLYITREPEVTCVVVDVSHEDPEVKFNWYVDGVEVHNAKTKPREEQYGSTYRVVSVLTVLHQDWLNGKEYKCKVSNKALPAPIEKTISKAKGQPREPQVYTLPPSRDELTKNQVSLTCLVKGFYPSDIAVEWESNGQPENNYKTTPPVLDSDGSFFLYSKLTVDKSRWQQGNVFSCSVMHEALHNHYTQKSLSLSPG

SEQ ID NO: 565 - protein, 452 aa, artificial
  Synthetic polypeptide
ELQLQESGPGLVKPSETLSLTCTVSGGSITASNYYWGWIRQPPGKGLEWIGSIDYTGSTYYEPSLKSRVTISVDTSKNQFSLKLSSVTAADTAVYYCATGSYYETYLGFDVWGQGTLVTVSSASTKGPSVFPLAPSSKSTSGGTAALGCLVKDYFPEPVTVSWNSGALTSGVHTFPAVLQSSGLYSLSSVVTVPSSSLGTQTYICNVNHKPSNTKVDKKVEPKSCDKTHTCPPCPAPELLGGPSVFLFPPKPKDTLYITREPEVTCVVVDVSHEDPEVKFNWYVDGVEVHNAKTKPREEQYGSTYRVVSVLTVLHQDWLNGKEYKCKVSNKALPAPIEKTISKAKGQPREPQVYTLPPSRDELTKNQVSLTCLVKGFYPSDIAVEWESNGQPENNYKTTPPVLDSDGSFFLYSKLTVDKSRWQQGNVFSCSVMHEALHNHYTQKSLSLSPGK

SEQ ID NO: 566 - protein, 452 aa, artificial
  Synthetic polypeptide
ELQLQESGPGLVKPSETLSLTCTVSGGSITASNYYWGWIRQPPGKGLEWIGSIDYTGSTYYEPSLKSRVTISVDTSKNQFSLKLSSVTAADTAVYYCATGSYYETYLGFDVWGQGTLVTVSSASTKGPSVFPLAPSSKSTSGGTAALGCLVKDYFPEPVTVSWNSGALTSGVHTFPAVLQSSGLYSLSSVVTVPSSSLGTQTYICNVNHKPSNTKVDKKVEPKSCDKTHTCPPCPAPELLGGPSVFLFPPKPKDTLMISRTPEVTCVVVDVSHEDPEVKFNWYVDGVEVHNAKTKPREEQYGSTYRVVSVLTVLHQDWLNGKEYKCKVSNKALPAPIEKTISKAKGQPREPQVYTLPPSRDELTKNQVSLWCLVKGFYPSDIAVEWESNGQPENNYKTTPPVLDSDGSFFLYSKLTVDKSRWQQGNVFSCSVMHEALHNHYTQKSLSLSPGK

SEQ ID NO: 567 - protein, 451 aa, artificial
  Synthetic polypeptide
ELQLQESGPGLVKPSETLSLTCTVSGGSITASNYYWGWIRQPPGKGLEWIGSIDYTGSTYYEPSLKSRVTISVDTSKNQFSLKLSSVTAADTAVYYCATGSYYETYLGFDVWGQGTLVTVSSASTKGPSVFPLAPSSKSTSGGTAALGCLVKDYFPEPVTVSWNSGALTSGVHTFPAVLQSSGLYSLSSVVTVPSSSLGTQTYICNVNHKPSNTKVDKKVEPKSCDKTHTCPPCPAPELLGGPSVFLFPPKPKDTLYITREPEVTCVVVDVSHEDPEVKFNWYVDGVEVHNAKTKPREEQYGSTYRVVSVLTVLHQDWLNGKEYKCKVSNKALPAPIEKTISKAKGQPREPQVYTLPPSRDELTKNQVSLWCLVKGFYPSDIAVEWESNGQPENNYKTTPPVLDSDGSFFLYSKLTVDKSRWQQGNVFSCSVMHEALHNHYTQKSLSLSPG

SEQ ID NO: 568 - protein, 452 aa, artificial
  Synthetic polypeptide
ELQLQESGPGLVKPSETLSLTCTVSGGSITASNYYWGWIRQPPGKGLEWIGSIDYTGSTYYEPSLKSRVTISVDTSKNQFSLKLSSVTAADTAVYYCATGSYYETYLGFDVWGQGTLVTVSSASTKGPSVFPLAPSSKSTSGGTAALGCLVKDYFPEPVTVSWNSGALTSGVHTFPAVLQSSGLYSLSSVVTVPSSSLGTQTYICNVNHKPSNTKVDKKVEPKSCDKTHTCPPCPAPELLGGPSVFLFPPKPKDTLYITREPEVTCVVVDVSHEDPEVKFNWYVDGVEVHNAKTKPREEQYGSTYRVVSVLTVLHQDWLNGKEYKCKVSNKALPAPIEKTISKAKGQPREPQVYTLPPSRDELTKNQVSLWCLVKGFYPSDIAVEWESNGQPENNYKTTPPVLDSDGSFFLYSKLTVDKSRWQQGNVFSCSVMHEALHNHYTQKSLSLSPGK

SEQ ID NO: 569 - protein, 452 aa, artificial
  Synthetic polypeptide
ELQLQESGPGLVKPSETLSLTCTVSGGSITASNYYWGWIRQPPGKGLEWIGSIDYTGSTYYEPSLKSRVTISVDTSKNQFSLKLSSVTAADTAVYYCATGSYYETYLGFDVWGQGTLVTVSSASTKGPSVFPLAPSSKSTSGGTAALGCLVKDYFPEPVTVSWNSGALTSGVHTFPAVLQSSGLYSLSSVVTVPSSSLGTQTYICNVNHKPSNTKVDKKVEPKSCDKTHTCPPCPAPELLGGPSVFLFPPKPKDTLMISRTPEVTCVVVDVSHEDPEVKFNWYVDGVEVHNAKTKPREEQYGSTYRVVSVLTVLHQDWLNGKEYKCKVSNKALPAPIEKTISKAKGQPREPQVYTLPPSRDELTKNQVSLSCAVKGFYPSDIAVEWESNGQPENNYKTTPPVLDSDGSFFLVSKLTVDKSRWQQGNVFSCSVMHEALHNHYTQKSLSLSPGK

SEQ ID NO: 570 - protein, 451 aa, artificial
  Synthetic polypeptide
ELQLQESGPGLVKPSETLSLTCTVSGGSITASNYYWGWIRQPPGKGLEWIGSIDYTGSTYYEPSLKSRVTISVDTSKNQFSLKLSSVTAADTAVYYCATGSYYETYLGFDVWGQGTLVTVSSASTKGPSVFPLAPSSKSTSGGTAALGCLVKDYFPEPVTVSWNSGALTSGVHTFPAVLQSSGLYSLSSVVTVPSSSLGTQTYICNVNHKPSNTKVDKKVEPKSCDKTHTCPPCPAPELLGGPSVFLFPPKPKDTLYITREPEVTCVVVDVSHEDPEVKFNWYVDGVEVHNAKTKPREEQYGSTYRVVSVLTVLHQDWLNGKEYKCKVSNKALPAPIEKTISKAKGQPREPQVYTLPPSRDELTKNQVSLSCAVKGFYPSDIAVEWESNGQPENNYKTTPPVLDSDGSFFLVSKLTVDKSRWQQGNVFSCSVMHEALHNHYTQKSLSLSPG

SEQ ID NO: 571 - protein, 452 aa, artificial
  Synthetic polypeptide
ELQLQESGPGLVKPSETLSLTCTVSGGSITASNYYWGWIRQPPGKGLEWIGSIDYTGSTYYEPSLKSRVTISVDTSKNQFSLKLSSVTAADTAVYYCATGSYYETYLGFDVWGQGTLVTVSSASTKGPSVFPLAPSSKSTSGGTAALGCLVKDYFPEPVTVSWNSGALTSGVHTFPAVLQSSGLYSLSSVVTVPSSSLGTQTYICNVNHKPSNTKVDKKVEPKSCDKTHTCPPCPAPELLGGPSVFLFPPKPKDTLYITREPEVTCVVVDVSHEDPEVKFNWYVDGVEVHNAKTKPREEQYGSTYRVVSVLTVLHQDWLNGKEYKCKVSNKALPAPIEKTISKAKGQPREPQVYTLPPSRDELTKNQVSLSCAVKGFYPSDIAVEWESNGQPENNYKTTPPVLDSDGSFFLVSKLTVDKSRWQQGNVFSCSVMHEALHNHYTQKSLSLSPGK

SEQ ID NO: 572 - protein, 452 aa, artificial
  Synthetic polypeptide
ELQLQESGPGLVKPSETLSLTCTVSGGSITASNYYWGWIRQPPGKGLEWIGSIDYTGSTYYEPSLKSRVTISVDTSKNQFSLKLSSVTAADTAVYYCATGNYYETYLGFDVWGQGTLVTVSSASTKGPSVFPLAPSSKSTSGGTAALGCLVKDYFPEPVTVSWNSGALTSGVHTFPAVLQSSGLYSLSSVVTVPSSSLGTQTYICNVNHKPSNTKVDKKVEPKSCDKTHTCPPCPAPELLGGPSVFLFPPKPKDTLMISRTPEVTCVVVDVSHEDPEVKFNWYVDGVEVHNAKTKPREEQYGSTYRVVSVLTVLHQDWLNGKEYKCKVSNKALPAPIEKTISKAKGQPREPQVYTLPPSRDELTKNQVSLTCLVKGFYPSDIAVEWESNGQPENNYKTTPPVLDSDGSFFLYSKLTVDKSRWQQGNVFSCSVMHEALHNHYTQKSLSLSPGK

SEQ ID NO: 573 - protein, 451 aa, artificial
  Synthetic polypeptide
ELQLQESGPGLVKPSETLSLTCTVSGGSITASNYYWGWIRQPPGKGLEWIGSIDYTGSTYYEPSLKSRVTISVDTSKNQFSLKLSSVTAADTAVYYCATGNYYETYLGFDVWGQGTLVTVSSASTKGPSVFPLAPSSKSTSGGTAALGCLVKDYFPEPVTVSWNSGALTSGVHTFPAVLQSSGLYSLSSVVTVPSSSLGTQTYICNVNHKPSNTKVDKKVEPKSCDKTHTCPPCPAPELLGGPSVFLFPPKPKDTLYITREPEVTCVVVDVSHEDPEVKFNWYVDGVEVHNAKTKPREEQYGSTYRVVSVLTVLHQDWLNGKEYKCKVSNKALPAPIEKTISKAKGQPREPQVYTLPPSRDELTKNQVSLTCLVKGFYPSDIAVEWESNGQPENNYKTTPPVLDSDGSFFLYSKLTVDKSRWQQGNVFSCSVMHEALHNHYTQKSLSLSPG

SEQ ID NO: 574 - protein, 452 aa, artificial
  Synthetic polypeptide
ELQLQESGPGLVKPSETLSLTCTVSGGSITASNYYWGWIRQPPGKGLEWIGSIDYTGSTYYEPSLKSRVTISVDTSKNQFSLKLSSVTAADTAVYYCATGNYYETYLGFDVWGQGTLVTVSSASTKGPSVFPLAPSSKSTSGGTAALGCLVKDYFPEPVTVSWNSGALTSGVHTFPAVLQSSGLYSLSSVVTVPSSSLGTQTYICNVNHKPSNTKVDKKVEPKSCDKTHTCPPCPAPELLGGPSVFLFPPKPKDTLYITREPEVTCVVVDVSHEDPEVKFNWYVDGVEVHNAKTKPREEQYGSTYRVVSVLTVLHQDWLNGKEYKCKVSNKALPAPIEKTISKAKGQPREPQVYTLPPSRDELTKNQVSLTCLVKGFYPSDIAVEWESNGQPENNYKTTPPVLDSDGSFFLYSKLTVDKSRWQQGNVFSCSVMHEALHNHYTQKSLSLSPGK

SEQ ID NO: 575 - protein, 452 aa, artificial
  Synthetic polypeptide
ELQLQESGPGLVKPSETLSLTCTVSGGSITASNYYWGWIRQPPGKGLEWIGSIDYTGSTYYEPSLKSRVTISVDTSKNQFSLKLSSVTAADTAVYYCATGNYYETYLGFDVWGQGTLVTVSSASTKGPSVFPLAPSSKSTSGGTAALGCLVKDYFPEPVTVSWNSGALTSGVHTFPAVLQSSGLYSLSSVVTVPSSSLGTQTYICNVNHKPSNTKVDKKVEPKSCDKTHTCPPCPAPELLGGPSVFLFPPKPKDTLMISRTPEVTCVVVDVSHEDPEVKFNWYVDGVEVHNAKTKPREEQYGSTYRVVSVLTVLHQDWLNGKEYKCKVSNKALPAPIEKTISKAKGQPREPQVYTLPPSRDELTKNQVSLWCLVKGFYPSDIAVEWESNGQPENNYKTTPPVLDSDGSFFLYSKLTVDKSRWQQGNVFSCSVMHEALHNHYTQKSLSLSPGK

SEQ ID NO: 576 - protein, 451 aa, artificial
  Synthetic polypeptide
ELQLQESGPGLVKPSETLSLTCTVSGGSITASNYYWGWIRQPPGKGLEWIGSIDYTGSTYYEPSLKSRVTISVDTSKNQFSLKLSSVTAADTAVYYCATGNYYETYLGFDVWGQGTLVTVSSASTKGPSVFPLAPSSKSTSGGTAALGCLVKDYFPEPVTVSWNSGALTSGVHTFPAVLQSSGLYSLSSVVTVPSSSLGTQTYICNVNHKPSNTKVDKKVEPKSCDKTHTCPPCPAPELLGGPSVFLFPPKPKDTLYITREPEVTCVVVDVSHEDPEVKFNWYVDGVEVHNAKTKPREEQYGSTYRVVSVLTVLHQDWLNGKEYKCKVSNKALPAPIEKTISKAKGQPREPQVYTLPPSRDELTKNQVSLWCLVKGFYPSDIAVEWESNGQPENNYKTTPPVLDSDGSFFLYSKLTVDKSRWQQGNVFSCSVMHEALHNHYTQKSLSLSPG

SEQ ID NO: 577 - protein, 452 aa, artificial
  Synthetic polypeptide
ELQLQESGPGLVKPSETLSLTCTVSGGSITASNYYWGWIRQPPGKGLEWIGSIDYTGSTYYEPSLKSRVTISVDTSKNQFSLKLSSVTAADTAVYYCATGNYYETYLGFDVWGQGTLVTVSSASTKGPSVFPLAPSSKSTSGGTAALGCLVKDYFPEPVTVSWNSGALTSGVHTFPAVLQSSGLYSLSSVVTVPSSSLGTQTYICNVNHKPSNTKVDKKVEPKSCDKTHTCPPCPAPELLGGPSVFLFPPKPKDTLYITREPEVTCVVVDVSHEDPEVKFNWYVDGVEVHNAKTKPREEQYGSTYRVVSVLTVLHQDWLNGKEYKCKVSNKALPAPIEKTISKAKGQPREPQVYTLPPSRDELTKNQVSLWCLVKGFYPSDIAVEWESNGQPENNYKTTPPVLDSDGSFFLYSKLTVDKSRWQQGNVFSCSVMHEALHNHYTQKSLSLSPGK

SEQ ID NO: 578 - protein, 452 aa, artificial
  Synthetic polypeptide
ELQLQESGPGLVKPSETLSLTCTVSGGSITASNYYWGWIRQPPGKGLEWIGSIDYTGSTYYEPSLKSRVTISVDTSKNQFSLKLSSVTAADTAVYYCATGNYYETYLGFDVWGQGTLVTVSSASTKGPSVFPLAPSSKSTSGGTAALGCLVKDYFPEPVTVSWNSGALTSGVHTFPAVLQSSGLYSLSSVVTVPSSSLGTQTYICNVNHKPSNTKVDKKVEPKSCDKTHTCPPCPAPELLGGPSVFLFPPKPKDTLMISRTPEVTCVVVDVSHEDPEVKFNWYVDGVEVHNAKTKPREEQYGSTYRVVSVLTVLHQDWLNGKEYKCKVSNKALPAPIEKTISKAKGQPREPQVYTLPPSRDELTKNQVSLSCAVKGFYPSDIAVEWESNGQPENNYKTTPPVLDSDGSFFLVSKLTVDKSRWQQGNVFSCSVMHEALHNHYTQKSLSLSPGK

SEQ ID NO: 579 - protein, 451 aa, artificial
  Synthetic polypeptide
ELQLQESGPGLVKPSETLSLTCTVSGGSITASNYYWGWIRQPPGKGLEWIGSIDYTGSTYYEPSLKSRVTISVDTSKNQFSLKLSSVTAADTAVYYCATGNYYETYLGFDVWGQGTLVTVSSASTKGPSVFPLAPSSKSTSGGTAALGCLVKDYFPEPVTVSWNSGALTSGVHTFPAVLQSSGLYSLSSVVTVPSSSLGTQTYICNVNHKPSNTKVDKKVEPKSCDKTHTCPPCPAPELLGGPSVFLFPPKPKDTLYITREPEVTCVVVDVSHEDPEVKFNWYVDGVEVHNAKTKPREEQYGSTYRVVSVLTVLHQDWLNGKEYKCKVSNKALPAPIEKTISKAKGQPREPQVYTLPPSRDELTKNQVSLSCAVKGFYPSDIAVEWESNGQPENNYKTTPPVLDSDGSFFLVSKLTVDKSRWQQGNVFSCSVMHEALHNHYTQKSLSLSPG

SEQ ID NO: 580 - protein, 452 aa, artificial
  Synthetic polypeptide
ELQLQESGPGLVKPSETLSLTCTVSGGSITASNYYWGWIRQPPGKGLEWIGSIDYTGSTYYEPSLKSRVTISVDTSKNQFSLKLSSVTAADTAVYYCATGNYYETYLGFDVWGQGTLVTVSSASTKGPSVFPLAPSSKSTSGGTAALGCLVKDYFPEPVTVSWNSGALTSGVHTFPAVLQSSGLYSLSSVVTVPSSSLGTQTYICNVNHKPSNTKVDKKVEPKSCDKTHTCPPCPAPELLGGPSVFLFPPKPKDTLYITREPEVTCVVVDVSHEDPEVKFNWYVDGVEVHNAKTKPREEQYGSTYRVVSVLTVLHQDWLNGKEYKCKVSNKALPAPIEKTISKAKGQPREPQVYTLPPSRDELTKNQVSLSCAVKGFYPSDIAVEWESNGQPENNYKTTPPVLDSDGSFFLVSKLTVDKSRWQQGNVFSCSVMHEALHNHYTQKSLSLSPGK

SEQ ID NO: 581 - protein, 452 aa, artificial
  Synthetic polypeptide
ELQLQESGPGLVKPSETLSLTCTVSGGSITASNTYWGWIRQPPGKGLEWIGSIDYTGSTYYNPSLKSRVTISVDTSKNQFSLKLSSVTAADTAVYYCATGKYYETYLGFDVWGQGTLVTVSSASTKGPSVFPLAPSSKSTSGGTAALGCLVKDYFPEPVTVSWNSGALTSGVHTFPAVLQSSGLYSLSSVVTVPSSSLGTQTYICNVNHKPSNTKVDKKVEPKSCDKTHTCPPCPAPELLGGPSVFLFPPKPKDTLMISRTPEVTCVVVDVSHEDPEVKFNWYVDGVEVHNAKTKPREEQYGSTYRVVSVLTVLHQDWLNGKEYKCKVSNKALPAPIEKTISKAKGQPREPQVYTLPPSRDELTKNQVSLTCLVKGFYPSDIAVEWESNGQPENNYKTTPPVLDSDGSFFLYSKLTVDKSRWQQGNVFSCSVMHEALHNHYTQKSLSLSPGK

SEQ ID NO: 582 - protein, 451 aa, artificial
  Synthetic polypeptide
ELQLQESGPGLVKPSETLSLTCTVSGGSITASNTYWGWIRQPPGKGLEWIGSIDYTGSTYYNPSLKSRVTISVDTSKNQFSLKLSSVTAADTAVYYCATGKYYETYLGFDVWGQGTLVTVSSASTKGPSVFPLAPSSKSTSGGTAALGCLVKDYFPEPVTVSWNSGALTSGVHTFPAVLQSSGLYSLSSVVTVPSSSLGTQTYICNVNHKPSNTKVDKKVEPKSCDKTHTCPPCPAPELLGGPSVFLFPPKPKDTLYITREPEVTCVVVDVSHEDPEVKFNWYVDGVEVHNAKTKPREEQYGSTYRVVSVLTVLHQDWLNGKEYKCKVSNKALPAPIEKTISKAKGQPREPQVYTLPPSRDELTKNQVSLTCLVKGFYPSDIAVEWESNGQPENNYKTTPPVLDSDGSFFLYSKLTVDKSRWQQGNVFSCSVMHEALHNHYTQKSLSLSPG

SEQ ID NO: 583 - protein, 452 aa, artificial
  Synthetic polypeptide
ELQLQESGPGLVKPSETLSLTCTVSGGSITASNTYWGWIRQPPGKGLEWIGSIDYTGSTYYNPSLKSRVTISVDTSKNQFSLKLSSVTAADTAVYYCATGKYYETYLGFDVWGQGTLVTVSSASTKGPSVFPLAPSSKSTSGGTAALGCLVKDYFPEPVTVSWNSGALTSGVHTFPAVLQSSGLYSLSSVVTVPSSSLGTQTYICNVNHKPSNTKVDKKVEPKSCDKTHTCPPCPAPELLGGPSVFLFPPKPKDTLYITREPEVTCVVVDVSHEDPEVKFNWYVDGVEVHNAKTKPREEQYGSTYRVVSVLTVLHQDWLNGKEYKCKVSNKALPAPIEKTISKAKGQPREPQVYTLPPSRDELTKNQVSLTCLVKGFYPSDIAVEWESNGQPENNYKTTPPVLDSDGSFFLYSKLTVDKSRWQQGNVFSCSVMHEALHNHYTQKSLSLSPGK

SEQ ID NO: 584 - protein, 452 aa, artificial
  Synthetic polypeptide
ELQLQESGPGLVKPSETLSLTCTVSGGSITASNTYWGWIRQPPGKGLEWIGSIDYTGSTYYNPSLKSRVTISVDTSKNQFSLKLSSVTAADTAVYYCATGKYYETYLGFDVWGQGTLVTVSSASTKGPSVFPLAPSSKSTSGGTAALGCLVKDYFPEPVTVSWNSGALTSGVHTFPAVLQSSGLYSLSSVVTVPSSSLGTQTYICNVNHKPSNTKVDKKVEPKSCDKTHTCPPCPAPELLGGPSVFLFPPKPKDTLMISRTPEVTCVVVDVSHEDPEVKFNWYVDGVEVHNAKTKPREEQYGSTYRVVSVLTVLHQDWLNGKEYKCKVSNKALPAPIEKTISKAKGQPREPQVYTLPPSRDELTKNQVSLWCLVKGFYPSDIAVEWESNGQPENNYKTTPPVLDSDGSFFLYSKLTVDKSRWQQGNVFSCSVMHEALHNHYTQKSLSLSPGK

SEQ ID NO: 585 - protein, 451 aa, artificial
  Synthetic polypeptide
ELQLQESGPGLVKPSETLSLTCTVSGGSITASNTYWGWIRQPPGKGLEWIGSIDYTGSTYYNPSLKSRVTISVDTSKNQFSLKLSSVTAADTAVYYCATGKYYETYLGFDVWGQGTLVTVSSASTKGPSVFPLAPSSKSTSGGTAALGCLVKDYFPEPVTVSWNSGALTSGVHTFPAVLQSSGLYSLSSVVTVPSSSLGTQTYICNVNHKPSNTKVDKKVEPKSCDKTHTCPPCPAPELLGGPSVFLFPPKPKDTLYITREPEVTCVVVDVSHEDPEVKFNWYVDGVEVHNAKTKPREEQYGSTYRVVSVLTVLHQDWLNGKEYKCKVSNKALPAPIEKTISKAKGQPREPQVYTLPPSRDELTKNQVSLWCLVKGFYPSDIAVEWESNGQPENNYKTTPPVLDSDGSFFLYSKLTVDKSRWQQGNVFSCSVMHEALHNHYTQKSLSLSPG

SEQ ID NO: 586 - protein, 452 aa, artificial
  Synthetic polypeptide
ELQLQESGPGLVKPSETLSLTCTVSGGSITASNTYWGWIRQPPGKGLEWIGSIDYTGSTYYNPSLKSRVTISVDTSKNQFSLKLSSVTAADTAVYYCATGKYYETYLGFDVWGQGTLVTVSSASTKGPSVFPLAPSSKSTSGGTAALGCLVKDYFPEPVTVSWNSGALTSGVHTFPAVLQSSGLYSLSSVVTVPSSSLGTQTYICNVNHKPSNTKVDKKVEPKSCDKTHTCPPCPAPELLGGPSVFLFPPKPKDTLYITREPEVTCVVVDVSHEDPEVKFNWYVDGVEVHNAKTKPREEQYGSTYRVVSVLTVLHQDWLNGKEYKCKVSNKALPAPIEKTISKAKGQPREPQVYTLPPSRDELTKNQVSLWCLVKGFYPSDIAVEWESNGQPENNYKTTPPVLDSDGSFFLYSKLTVDKSRWQQGNVFSCSVMHEALHNHYTQKSLSLSPGK

SEQ ID NO: 587 - protein, 452 aa, artificial
  Synthetic polypeptide
ELQLQESGPGLVKPSETLSLTCTVSGGSITASNTYWGWIRQPPGKGLEWIGSIDYTGSTYYNPSLKSRVTISVDTSKNQFSLKLSSVTAADTAVYYCATGKYYETYLGFDVWGQGTLVTVSSASTKGPSVFPLAPSSKSTSGGTAALGCLVKDYFPEPVTVSWNSGALTSGVHTFPAVLQSSGLYSLSSVVTVPSSSLGTQTYICNVNHKPSNTKVDKKVEPKSCDKTHTCPPCPAPELLGGPSVFLFPPKPKDTLMISRTPEVTCVVVDVSHEDPEVKFNWYVDGVEVHNAKTKPREEQYGSTYRVVSVLTVLHQDWLNGKEYKCKVSNKALPAPIEKTISKAKGQPREPQVYTLPPSRDELTKNQVSLSCAVKGFYPSDIAVEWESNGQPENNYKTTPPVLDSDGSFFLVSKLTVDKSRWQQGNVFSCSVMHEALHNHYTQKSLSLSPGK

SEQ ID NO: 588 - protein, 451 aa, artificial
  Synthetic polypeptide
ELQLQESGPGLVKPSETLSLTCTVSGGSITASNTYWGWIRQPPGKGLEWIGSIDYTGSTYYNPSLKSRVTISVDTSKNQFSLKLSSVTAADTAVYYCATGKYYETYLGFDVWGQGTLVTVSSASTKGPSVFPLAPSSKSTSGGTAALGCLVKDYFPEPVTVSWNSGALTSGVHTFPAVLQSSGLYSLSSVVTVPSSSLGTQTYICNVNHKPSNTKVDKKVEPKSCDKTHTCPPCPAPELLGGPSVFLFPPKPKDTLYITREPEVTCVVVDVSHEDPEVKFNWYVDGVEVHNAKTKPREEQYGSTYRVVSVLTVLHQDWLNGKEYKCKVSNKALPAPIEKTISKAKGQPREPQVYTLPPSRDELTKNQVSLSCAVKGFYPSDIAVEWESNGQPENNYKTTPPVLDSDGSFFLVSKLTVDKSRWQQGNVFSCSVMHEALHNHYTQKSLSLSPG

SEQ ID NO: 589 - protein, 452 aa, artificial
  Synthetic polypeptide
ELQLQESGPGLVKPSETLSLTCTVSGGSITASNTYWGWIRQPPGKGLEWIGSIDYTGSTYYNPSLKSRVTISVDTSKNQFSLKLSSVTAADTAVYYCATGKYYETYLGFDVWGQGTLVTVSSASTKGPSVFPLAPSSKSTSGGTAALGCLVKDYFPEPVTVSWNSGALTSGVHTFPAVLQSSGLYSLSSVVTVPSSSLGTQTYICNVNHKPSNTKVDKKVEPKSCDKTHTCPPCPAPELLGGPSVFLFPPKPKDTLYITREPEVTCVVVDVSHEDPEVKFNWYVDGVEVHNAKTKPREEQYGSTYRVVSVLTVLHQDWLNGKEYKCKVSNKALPAPIEKTISKAKGQPREPQVYTLPPSRDELTKNQVSLSCAVKGFYPSDIAVEWESNGQPENNYKTTPPVLDSDGSFFLVSKLTVDKSRWQQGNVFSCSVMHEALHNHYTQKSLSLSPGK

SEQ ID NO: 590 - protein, 452 aa, artificial
  Synthetic polypeptide
ELQLQESGPGLVKPSETLSLTCTVSGGSITASNYYWGWIRQPPGKGLEWIGSIDYTGSTYYNPSLKSRVTISVDTSKNQFSLKLSSVTAADTAVYYCASGKYYETYLGFDVWGQGTLVTVSSASTKGPSVFPLAPSSKSTSGGTAALGCLVKDYFPEPVTVSWNSGALTSGVHTFPAVLQSSGLYSLSSVVTVPSSSLGTQTYICNVNHKPSNTKVDKKVEPKSCDKTHTCPPCPAPELLGGPSVFLFPPKPKDTLMISRTPEVTCVVVDVSHEDPEVKFNWYVDGVEVHNAKTKPREEQYGSTYRVVSVLTVLHQDWLNGKEYKCKVSNKALPAPIEKTISKAKGQPREPQVYTLPPSRDELTKNQVSLTCLVKGFYPSDIAVEWESNGQPENNYKTTPPVLDSDGSFFLYSKLTVDKSRWQQGNVFSCSVMHEALHNHYTQKSLSLSPGK

SEQ ID NO: 591 - protein, 451 aa, artificial
  Synthetic polypeptide
ELQLQESGPGLVKPSETLSLTCTVSGGSITASNYYWGWIRQPPGKGLEWIGSIDYTGSTYYNPSLKSRVTISVDTSKNQFSLKLSSVTAADTAVYYCASGKYYETYLGFDVWGQGTLVTVSSASTKGPSVFPLAPSSKSTSGGTAALGCLVKDYFPEPVTVSWNSGALTSGVHTFPAVLQSSGLYSLSSVVTVPSSSLGTQTYICNVNHKPSNTKVDKKVEPKSCDKTHTCPPCPAPELLGGPSVFLFPPKPKDTLYITREPEVTCVVVDVSHEDPEVKFNWYVDGVEVHNAKTKPREEQYGSTYRVVSVLTVLHQDWLNGKEYKCKVSNKALPAPIEKTISKAKGQPREPQVYTLPPSRDELTKNQVSLTCLVKGFYPSDIAVEWESNGQPENNYKTTPPVLDSDGSFFLYSKLTVDKSRWQQGNVFSCSVMHEALHNHYTQKSLSLSPG

SEQ ID NO: 592 - protein, 452 aa, artificial
  Synthetic polypeptide
ELQLQESGPGLVKPSETLSLTCTVSGGSITASNYYWGWIRQPPGKGLEWIGSIDYTGSTYYNPSLKSRVTISVDTSKNQFSLKLSSVTAADTAVYYCASGKYYETYLGFDVWGQGTLVTVSSASTKGPSVFPLAPSSKSTSGGTAALGCLVKDYFPEPVTVSWNSGALTSGVHTFPAVLQSSGLYSLSSVVTVPSSSLGTQTYICNVNHKPSNTKVDKKVEPKSCDKTHTCPPCPAPELLGGPSVFLFPPKPKDTLYITREPEVTCVVVDVSHEDPEVKFNWYVDGVEVHNAKTKPREEQYGSTYRVVSVLTVLHQDWLNGKEYKCKVSNKALPAPIEKTISKAKGQPREPQVYTLPPSRDELTKNQVSLTCLVKGFYPSDIAVEWESNGQPENNYKTTPPVLDSDGSFFLYSKLTVDKSRWQQGNVFSCSVMHEALHNHYTQKSLSLSPGK

SEQ ID NO: 593 - protein, 452 aa, artificial
  Synthetic polypeptide
ELQLQESGPGLVKPSETLSLTCTVSGGSITASNYYWGWIRQPPGKGLEWIGSIDYTGSTYYNPSLKSRVTISVDTSKNQFSLKLSSVTAADTAVYYCASGKYYETYLGFDVWGQGTLVTVSSASTKGPSVFPLAPSSKSTSGGTAALGCLVKDYFPEPVTVSWNSGALTSGVHTFPAVLQSSGLYSLSSVVTVPSSSLGTQTYICNVNHKPSNTKVDKKVEPKSCDKTHTCPPCPAPELLGGPSVFLFPPKPKDTLMISRTPEVTCVVVDVSHEDPEVKFNWYVDGVEVHNAKTKPREEQYGSTYRVVSVLTVLHQDWLNGKEYKCKVSNKALPAPIEKTISKAKGQPREPQVYTLPPSRDELTKNQVSLWCLVKGFYPSDIAVEWESNGQPENNYKTTPPVLDSDGSFFLYSKLTVDKSRWQQGNVFSCSVMHEALHNHYTQKSLSLSPGK

SEQ ID NO: 594 - protein, 451 aa, artificial
  Synthetic polypeptide
ELQLQESGPGLVKPSETLSLTCTVSGGSITASNYYWGWIRQPPGKGLEWIGSIDYTGSTYYNPSLKSRVTISVDTSKNQFSLKLSSVTAADTAVYYCASGKYYETYLGFDVWGQGTLVTVSSASTKGPSVFPLAPSSKSTSGGTAALGCLVKDYFPEPVTVSWNSGALTSGVHTFPAVLQSSGLYSLSSVVTVPSSSLGTQTYICNVNHKPSNTKVDKKVEPKSCDKTHTCPPCPAPELLGGPSVFLFPPKPKDTLYITREPEVTCVVVDVSHEDPEVKFNWYVDGVEVHNAKTKPREEQYGSTYRVVSVLTVLHQDWLNGKEYKCKVSNKALPAPIEKTISKAKGQPREPQVYTLPPSRDELTKNQVSLWCLVKGFYPSDIAVEWESNGQPENNYKTTPPVLDSDGSFFLYSKLTVDKSRWQQGNVFSCSVMHEALHNHYTQKSLSLSPG

SEQ ID NO: 595 - protein, 452 aa, artificial
  Synthetic polypeptide
ELQLQESGPGLVKPSETLSLTCTVSGGSITASNYYWGWIRQPPGKGLEWIGSIDYTGSTYYNPSLKSRVTISVDTSKNQFSLKLSSVTAADTAVYYCASGKYYETYLGFDVWGQGTLVTVSSASTKGPSVFPLAPSSKSTSGGTAALGCLVKDYFPEPVTVSWNSGALTSGVHTFPAVLQSSGLYSLSSVVTVPSSSLGTQTYICNVNHKPSNTKVDKKVEPKSCDKTHTCPPCPAPELLGGPSVFLFPPKPKDTLYITREPEVTCVVVDVSHEDPEVKFNWYVDGVEVHNAKTKPREEQYGSTYRVVSVLTVLHQDWLNGKEYKCKVSNKALPAPIEKTISKAKGQPREPQVYTLPPSRDELTKNQVSLWCLVKGFYPSDIAVEWESNGQPENNYKTTPPVLDSDGSFFLYSKLTVDKSRWQQGNVFSCSVMHEALHNHYTQKSLSLSPGK

SEQ ID NO: 596 - protein, 452 aa, artificial
  Synthetic polypeptide
ELQLQESGPGLVKPSETLSLTCTVSGGSITASNYYWGWIRQPPGKGLEWIGSIDYTGSTYYNPSLKSRVTISVDTSKNQFSLKLSSVTAADTAVYYCASGKYYETYLGFDVWGQGTLVTVSSASTKGPSVFPLAPSSKSTSGGTAALGCLVKDYFPEPVTVSWNSGALTSGVHTFPAVLQSSGLYSLSSVVTVPSSSLGTQTYICNVNHKPSNTKVDKKVEPKSCDKTHTCPPCPAPELLGGPSVFLFPPKPKDTLMISRTPEVTCVVVDVSHEDPEVKFNWYVDGVEVHNAKTKPREEQYGSTYRVVSVLTVLHQDWLNGKEYKCKVSNKALPAPIEKTISKAKGQPREPQVYTLPPSRDELTKNQVSLSCAVKGFYPSDIAVEWESNGQPENNYKTTPPVLDSDGSFFLVSKLTVDKSRWQQGNVFSCSVMHEALHNHYTQKSLSLSPGK

SEQ ID NO: 597 - protein, 451 aa, artificial
  Synthetic polypeptide
ELQLQESGPGLVKPSETLSLTCTVSGGSITASNYYWGWIRQPPGKGLEWIGSIDYTGSTYYNPSLKSRVTISVDTSKNQFSLKLSSVTAADTAVYYCASGKYYETYLGFDVWGQGTLVTVSSASTKGPSVFPLAPSSKSTSGGTAALGCLVKDYFPEPVTVSWNSGALTSGVHTFPAVLQSSGLYSLSSVVTVPSSSLGTQTYICNVNHKPSNTKVDKKVEPKSCDKTHTCPPCPAPELLGGPSVFLFPPKPKDTLYITREPEVTCVVVDVSHEDPEVKFNWYVDGVEVHNAKTKPREEQYGSTYRVVSVLTVLHQDWLNGKEYKCKVSNKALPAPIEKTISKAKGQPREPQVYTLPPSRDELTKNQVSLSCAVKGFYPSDIAVEWESNGQPENNYKTTPPVLDSDGSFFLVSKLTVDKSRWQQGNVFSCSVMHEALHNHYTQKSLSLSPG

SEQ ID NO: 598 - protein, 452 aa, artificial
  Synthetic polypeptide
ELQLQESGPGLVKPSETLSLTCTVSGGSITASNYYWGWIRQPPGKGLEWIGSIDYTGSTYYNPSLKSRVTISVDTSKNQFSLKLSSVTAADTAVYYCASGKYYETYLGFDVWGQGTLVTVSSASTKGPSVFPLAPSSKSTSGGTAALGCLVKDYFPEPVTVSWNSGALTSGVHTFPAVLQSSGLYSLSSVVTVPSSSLGTQTYICNVNHKPSNTKVDKKVEPKSCDKTHTCPPCPAPELLGGPSVFLFPPKPKDTLYITREPEVTCVVVDVSHEDPEVKFNWYVDGVEVHNAKTKPREEQYGSTYRVVSVLTVLHQDWLNGKEYKCKVSNKALPAPIEKTISKAKGQPREPQVYTLPPSRDELTKNQVSLSCAVKGFYPSDIAVEWESNGQPENNYKTTPPVLDSDGSFFLVSKLTVDKSRWQQGNVFSCSVMHEALHNHYTQKSLSLSPGK

SEQ ID NO: 599 - protein, 452 aa, artificial
  Synthetic polypeptide
ELQLQESGPGLVKPSETLSLTCTVSGGSITSSNYYWGWIRQPPGKGLEWIGSIDYTGSTYYNPSLKSRVTISVDTSKNQFSLKLSSVTAADTAVYYCATGKYYETYLGFDVWGQGTLVTVSSASTKGPSVFPLAPSSKSTSGGTAALGCLVKDYFPEPVTVSWNSGALTSGVHTFPAVLQSSGLYSLSSVVTVPSSSLGTQTYICNVNHKPSNTKVDKKVEPKSCDKTHTCPPCPAPELLGGPSVFLFPPKPKDTLMISRTPEVTCVVVDVSHEDPEVKFNWYVDGVEVHNAKTKPREEQYGSTYRVVSVLTVLHQDWLNGKEYKCKVSNKALPAPIEKTISKAKGQPREPQVYTLPPSRDELTKNQVSLTCLVKGFYPSDIAVEWESNGQPENNYKTTPPVLDSDGSFFLYSKLTVDKSRWQQGNVFSCSVMHEALHNHYTQKSLSLSPGK

SEQ ID NO: 600 - protein, 451 aa, artificial
  Synthetic polypeptide
ELQLQESGPGLVKPSETLSLTCTVSGGSITSSNYYWGWIRQPPGKGLEWIGSIDYTGSTYYNPSLKSRVTISVDTSKNQFSLKLSSVTAADTAVYYCATGKYYETYLGFDVWGQGTLVTVSSASTKGPSVFPLAPSSKSTSGGTAALGCLVKDYFPEPVTVSWNSGALTSGVHTFPAVLQSSGLYSLSSVVTVPSSSLGTQTYICNVNHKPSNTKVDKKVEPKSCDKTHTCPPCPAPELLGGPSVFLFPPKPKDTLYITREPEVTCVVVDVSHEDPEVKFNWYVDGVEVHNAKTKPREEQYGSTYRVVSVLTVLHQDWLNGKEYKCKVSNKALPAPIEKTISKAKGQPREPQVYTLPPSRDELTKNQVSLTCLVKGFYPSDIAVEWESNGQPENNYKTTPPVLDSDGSFFLYSKLTVDKSRWQQGNVFSCSVMHEALHNHYTQKSLSLSPG

SEQ ID NO: 601 - protein, 452 aa, artificial
  Synthetic polypeptide
ELQLQESGPGLVKPSETLSLTCTVSGGSITSSNYYWGWIRQPPGKGLEWIGSIDYTGSTYYNPSLKSRVTISVDTSKNQFSLKLSSVTAADTAVYYCATGKYYETYLGFDVWGQGTLVTVSSASTKGPSVFPLAPSSKSTSGGTAALGCLVKDYFPEPVTVSWNSGALTSGVHTFPAVLQSSGLYSLSSVVTVPSSSLGTQTYICNVNHKPSNTKVDKKVEPKSCDKTHTCPPCPAPELLGGPSVFLFPPKPKDTLYITREPEVTCVVVDVSHEDPEVKFNWYVDGVEVHNAKTKPREEQYGSTYRVVSVLTVLHQDWLNGKEYKCKVSNKALPAPIEKTISKAKGQPREPQVYTLPPSRDELTKNQVSLTCLVKGFYPSDIAVEWESNGQPENNYKTTPPVLDSDGSFFLYSKLTVDKSRWQQGNVFSCSVMHEALHNHYTQKSLSLSPGK

SEQ ID NO: 602 - protein, 452 aa, artificial
  Synthetic polypeptide
ELQLQESGPGLVKPSETLSLTCTVSGGSITSSNYYWGWIRQPPGKGLEWIGSIDYTGSTYYNPSLKSRVTISVDTSKNQFSLKLSSVTAADTAVYYCATGKYYETYLGFDVWGQGTLVTVSSASTKGPSVFPLAPSSKSTSGGTAALGCLVKDYFPEPVTVSWNSGALTSGVHTFPAVLQSSGLYSLSSVVTVPSSSLGTQTYICNVNHKPSNTKVDKKVEPKSCDKTHTCPPCPAPELLGGPSVFLFPPKPKDTLMISRTPEVTCVVVDVSHEDPEVKFNWYVDGVEVHNAKTKPREEQYGSTYRVVSVLTVLHQDWLNGKEYKCKVSNKALPAPIEKTISKAKGQPREPQVYTLPPSRDELTKNQVSLWCLVKGFYPSDIAVEWESNGQPENNYKTTPPVLDSDGSFFLYSKLTVDKSRWQQGNVFSCSVMHEALHNHYTQKSLSLSPGK

SEQ ID NO: 603 - protein, 451 aa, artificial
  Synthetic polypeptide
ELQLQESGPGLVKPSETLSLTCTVSGGSITSSNYYWGWIRQPPGKGLEWIGSIDYTGSTYYNPSLKSRVTISVDTSKNQFSLKLSSVTAADTAVYYCATGKYYETYLGFDVWGQGTLVTVSSASTKGPSVFPLAPSSKSTSGGTAALGCLVKDYFPEPVTVSWNSGALTSGVHTFPAVLQSSGLYSLSSVVTVPSSSLGTQTYICNVNHKPSNTKVDKKVEPKSCDKTHTCPPCPAPELLGGPSVFLFPPKPKDTLYITREPEVTCVVVDVSHEDPEVKFNWYVDGVEVHNAKTKPREEQYGSTYRVVSVLTVLHQDWLNGKEYKCKVSNKALPAPIEKTISKAKGQPREPQVYTLPPSRDELTKNQVSLWCLVKGFYPSDIAVEWESNGQPENNYKTTPPVLDSDGSFFLYSKLTVDKSRWQQGNVFSCSVMHEALHNHYTQKSLSLSPG

SEQ ID NO: 604 - protein, 452 aa, artificial
  Synthetic polypeptide
ELQLQESGPGLVKPSETLSLTCTVSGGSITSSNYYWGWIRQPPGKGLEWIGSIDYTGSTYYNPSLKSRVTISVDTSKNQFSLKLSSVTAADTAVYYCATGKYYETYLGFDVWGQGTLVTVSSASTKGPSVFPLAPSSKSTSGGTAALGCLVKDYFPEPVTVSWNSGALTSGVHTFPAVLQSSGLYSLSSVVTVPSSSLGTQTYICNVNHKPSNTKVDKKVEPKSCDKTHTCPPCPAPELLGGPSVFLFPPKPKDTLYITREPEVTCVVVDVSHEDPEVKFNWYVDGVEVHNAKTKPREEQYGSTYRVVSVLTVLHQDWLNGKEYKCKVSNKALPAPIEKTISKAKGQPREPQVYTLPPSRDELTKNQVSLWCLVKGFYPSDIAVEWESNGQPENNYKTTPPVLDSDGSFFLYSKLTVDKSRWQQGNVFSCSVMHEALHNHYTQKSLSLSPGK

SEQ ID NO: 605 - protein, 452 aa, artificial
  Synthetic polypeptide
ELQLQESGPGLVKPSETLSLTCTVSGGSITSSNYYWGWIRQPPGKGLEWIGSIDYTGSTYYNPSLKSRVTISVDTSKNQFSLKLSSVTAADTAVYYCATGKYYETYLGFDVWGQGTLVTVSSASTKGPSVFPLAPSSKSTSGGTAALGCLVKDYFPEPVTVSWNSGALTSGVHTFPAVLQSSGLYSLSSVVTVPSSSLGTQTYICNVNHKPSNTKVDKKVEPKSCDKTHTCPPCPAPELLGGPSVFLFPPKPKDTLMISRTPEVTCVVVDVSHEDPEVKFNWYVDGVEVHNAKTKPREEQYGSTYRVVSVLTVLHQDWLNGKEYKCKVSNKALPAPIEKTISKAKGQPREPQVYTLPPSRDELTKNQVSLSCAVKGFYPSDIAVEWESNGQPENNYKTTPPVLDSDGSFFLVSKLTVDKSRWQQGNVFSCSVMHEALHNHYTQKSLSLSPGK

SEQ ID NO: 606 - protein, 451 aa, artificial
  Synthetic polypeptide
ELQLQESGPGLVKPSETLSLTCTVSGGSITSSNYYWGWIRQPPGKGLEWIGSIDYTGSTYYNPSLKSRVTISVDTSKNQFSLKLSSVTAADTAVYYCATGKYYETYLGFDVWGQGTLVTVSSASTKGPSVFPLAPSSKSTSGGTAALGCLVKDYFPEPVTVSWNSGALTSGVHTFPAVLQSSGLYSLSSVVTVPSSSLGTQTYICNVNHKPSNTKVDKKVEPKSCDKTHTCPPCPAPELLGGPSVFLFPPKPKDTLYITREPEVTCVVVDVSHEDPEVKFNWYVDGVEVHNAKTKPREEQYGSTYRVVSVLTVLHQDWLNGKEYKCKVSNKALPAPIEKTISKAKGQPREPQVYTLPPSRDELTKNQVSLSCAVKGFYPSDIAVEWESNGQPENNYKTTPPVLDSDGSFFLVSKLTVDKSRWQQGNVFSCSVMHEALHNHYTQKSLSLSPG

SEQ ID NO: 607 - protein, 452 aa, artificial
  Synthetic polypeptide
ELQLQESGPGLVKPSETLSLTCTVSGGSITSSNYYWGWIRQPPGKGLEWIGSIDYTGSTYYNPSLKSRVTISVDTSKNQFSLKLSSVTAADTAVYYCATGKYYETYLGFDVWGQGTLVTVSSASTKGPSVFPLAPSSKSTSGGTAALGCLVKDYFPEPVTVSWNSGALTSGVHTFPAVLQSSGLYSLSSVVTVPSSSLGTQTYICNVNHKPSNTKVDKKVEPKSCDKTHTCPPCPAPELLGGPSVFLFPPKPKDTLYITREPEVTCVVVDVSHEDPEVKFNWYVDGVEVHNAKTKPREEQYGSTYRVVSVLTVLHQDWLNGKEYKCKVSNKALPAPIEKTISKAKGQPREPQVYTLPPSRDELTKNQVSLSCAVKGFYPSDIAVEWESNGQPENNYKTTPPVLDSDGSFFLVSKLTVDKSRWQQGNVFSCSVMHEALHNHYTQKSLSLSPGK

SEQ ID NO: 608 - protein, 452 aa, artificial
  Synthetic polypeptide
ELQLQESGPGLVKPSETLSLTCTVSGGSITSSNYYWGWIRQPPGKGLEWIGSIDYTGSTYYQPSLKSRVTISVDTSKNQFSLKLSSVTAADTAVYYCARGNYYETYLGFDVWGQGTLVTVSSASTKGPSVFPLAPSSKSTSGGTAALGCLVKDYFPEPVTVSWNSGALTSGVHTFPAVLQSSGLYSLSSVVTVPSSSLGTQTYICNVNHKPSNTKVDKKVEPKSCDKTHTCPPCPAPELLGGPSVFLFPPKPKDTLMISRTPEVTCVVVDVSHEDPEVKFNWYVDGVEVHNAKTKPREEQYGSTYRVVSVLTVLHQDWLNGKEYKCKVSNKALPAPIEKTISKAKGQPREPQVYTLPPSRDELTKNQVSLTCLVKGFYPSDIAVEWESNGQPENNYKTTPPVLDSDGSFFLYSKLTVDKSRWQQGNVFSCSVMHEALHNHYTQKSLSLSPGK

SEQ ID NO: 609 - protein, 451 aa, artificial
  Synthetic polypeptide
ELQLQESGPGLVKPSETLSLTCTVSGGSITSSNYYWGWIRQPPGKGLEWIGSIDYTGSTYYQPSLKSRVTISVDTSKNQFSLKLSSVTAADTAVYYCARGNYYETYLGFDVWGQGTLVTVSSASTKGPSVFPLAPSSKSTSGGTAALGCLVKDYFPEPVTVSWNSGALTSGVHTFPAVLQSSGLYSLSSVVTVPSSSLGTQTYICNVNHKPSNTKVDKKVEPKSCDKTHTCPPCPAPELLGGPSVFLFPPKPKDTLYITREPEVTCVVVDVSHEDPEVKFNWYVDGVEVHNAKTKPREEQYGSTYRVVSVLTVLHQDWLNGKEYKCKVSNKALPAPIEKTISKAKGQPREPQVYTLPPSRDELTKNQVSLTCLVKGFYPSDIAVEWESNGQPENNYKTTPPVLDSDGSFFLYSKLTVDKSRWQQGNVFSCSVMHEALHNHYTQKSLSLSPG

SEQ ID NO: 610 - protein, 452 aa, artificial
  Synthetic polypeptide
ELQLQESGPGLVKPSETLSLTCTVSGGSITSSNYYWGWIRQPPGKGLEWIGSIDYTGSTYYQPSLKSRVTISVDTSKNQFSLKLSSVTAADTAVYYCARGNYYETYLGFDVWGQGTLVTVSSASTKGPSVFPLAPSSKSTSGGTAALGCLVKDYFPEPVTVSWNSGALTSGVHTFPAVLQSSGLYSLSSVVTVPSSSLGTQTYICNVNHKPSNTKVDKKVEPKSCDKTHTCPPCPAPELLGGPSVFLFPPKPKDTLYITREPEVTCVVVDVSHEDPEVKFNWYVDGVEVHNAKTKPREEQYGSTYRVVSVLTVLHQDWLNGKEYKCKVSNKALPAPIEKTISKAKGQPREPQVYTLPPSRDELTKNQVSLTCLVKGFYPSDIAVEWESNGQPENNYKTTPPVLDSDGSFFLYSKLTVDKSRWQQGNVFSCSVMHEALHNHYTQKSLSLSPGK

SEQ ID NO: 611 - protein, 452 aa, artificial
  Synthetic polypeptide
ELQLQESGPGLVKPSETLSLTCTVSGGSITSSNYYWGWIRQPPGKGLEWIGSIDYTGSTYYQPSLKSRVTISVDTSKNQFSLKLSSVTAADTAVYYCARGNYYETYLGFDVWGQGTLVTVSSASTKGPSVFPLAPSSKSTSGGTAALGCLVKDYFPEPVTVSWNSGALTSGVHTFPAVLQSSGLYSLSSVVTVPSSSLGTQTYICNVNHKPSNTKVDKKVEPKSCDKTHTCPPCPAPELLGGPSVFLFPPKPKDTLMISRTPEVTCVVVDVSHEDPEVKFNWYVDGVEVHNAKTKPREEQYGSTYRVVSVLTVLHQDWLNGKEYKCKVSNKALPAPIEKTISKAKGQPREPQVYTLPPSRDELTKNQVSLWCLVKGFYPSDIAVEWESNGQPENNYKTTPPVLDSDGSFFLYSKLTVDKSRWQQGNVFSCSVMHEALHNHYTQKSLSLSPGK

SEQ ID NO: 612 - protein, 451 aa, artificial
  Synthetic polypeptide
ELQLQESGPGLVKPSETLSLTCTVSGGSITSSNYYWGWIRQPPGKGLEWIGSIDYTGSTYYQPSLKSRVTISVDTSKNQFSLKLSSVTAADTAVYYCARGNYYETYLGFDVWGQGTLVTVSSASTKGPSVFPLAPSSKSTSGGTAALGCLVKDYFPEPVTVSWNSGALTSGVHTFPAVLQSSGLYSLSSVVTVPSSSLGTQTYICNVNHKPSNTKVDKKVEPKSCDKTHTCPPCPAPELLGGPSVFLFPPKPKDTLYITREPEVTCVVVDVSHEDPEVKFNWYVDGVEVHNAKTKPREEQYGSTYRVVSVLTVLHQDWLNGKEYKCKVSNKALPAPIEKTISKAKGQPREPQVYTLPPSRDELTKNQVSLWCLVKGFYPSDIAVEWESNGQPENNYKTTPPVLDSDGSFFLYSKLTVDKSRWQQGNVFSCSVMHEALHNHYTQKSLSLSPG

SEQ ID NO: 613 - protein, 452 aa, artificial
  Synthetic polypeptide
ELQLQESGPGLVKPSETLSLTCTVSGGSITSSNYYWGWIRQPPGKGLEWIGSIDYTGSTYYQPSLKSRVTISVDTSKNQFSLKLSSVTAADTAVYYCARGNYYETYLGFDVWGQGTLVTVSSASTKGPSVFPLAPSSKSTSGGTAALGCLVKDYFPEPVTVSWNSGALTSGVHTFPAVLQSSGLYSLSSVVTVPSSSLGTQTYICNVNHKPSNTKVDKKVEPKSCDKTHTCPPCPAPELLGGPSVFLFPPKPKDTLYITREPEVTCVVVDVSHEDPEVKFNWYVDGVEVHNAKTKPREEQYGSTYRVVSVLTVLHQDWLNGKEYKCKVSNKALPAPIEKTISKAKGQPREPQVYTLPPSRDELTKNQVSLWCLVKGFYPSDIAVEWESNGQPENNYKTTPPVLDSDGSFFLYSKLTVDKSRWQQGNVFSCSVMHEALHNHYTQKSLSLSPGK

SEQ ID NO: 614 - protein, 452 aa, artificial
  Synthetic polypeptide
ELQLQESGPGLVKPSETLSLTCTVSGGSITSSNYYWGWIRQPPGKGLEWIGSIDYTGSTYYQPSLKSRVTISVDTSKNQFSLKLSSVTAADTAVYYCARGNYYETYLGFDVWGQGTLVTVSSASTKGPSVFPLAPSSKSTSGGTAALGCLVKDYFPEPVTVSWNSGALTSGVHTFPAVLQSSGLYSLSSVVTVPSSSLGTQTYICNVNHKPSNTKVDKKVEPKSCDKTHTCPPCPAPELLGGPSVFLFPPKPKDTLMISRTPEVTCVVVDVSHEDPEVKFNWYVDGVEVHNAKTKPREEQYGSTYRVVSVLTVLHQDWLNGKEYKCKVSNKALPAPIEKTISKAKGQPREPQVYTLPPSRDELTKNQVSLSCAVKGFYPSDIAVEWESNGQPENNYKTTPPVLDSDGSFFLVSKLTVDKSRWQQGNVFSCSVMHEALHNHYTQKSLSLSPGK

SEQ ID NO: 615 - protein, 451 aa, artificial
  Synthetic polypeptide
ELQLQESGPGLVKPSETLSLTCTVSGGSITSSNYYWGWIRQPPGKGLEWIGSIDYTGSTYYQPSLKSRVTISVDTSKNQFSLKLSSVTAADTAVYYCARGNYYETYLGFDVWGQGTLVTVSSASTKGPSVFPLAPSSKSTSGGTAALGCLVKDYFPEPVTVSWNSGALTSGVHTFPAVLQSSGLYSLSSVVTVPSSSLGTQTYICNVNHKPSNTKVDKKVEPKSCDKTHTCPPCPAPELLGGPSVFLFPPKPKDTLYITREPEVTCVVVDVSHEDPEVKFNWYVDGVEVHNAKTKPREEQYGSTYRVVSVLTVLHQDWLNGKEYKCKVSNKALPAPIEKTISKAKGQPREPQVYTLPPSRDELTKNQVSLSCAVKGFYPSDIAVEWESNGQPENNYKTTPPVLDSDGSFFLVSKLTVDKSRWQQGNVFSCSVMHEALHNHYTQKSLSLSPG

SEQ ID NO: 616 - protein, 452 aa, artificial
  Synthetic polypeptide
ELQLQESGPGLVKPSETLSLTCTVSGGSITSSNYYWGWIRQPPGKGLEWIGSIDYTGSTYYQPSLKSRVTISVDTSKNQFSLKLSSVTAADTAVYYCARGNYYETYLGFDVWGQGTLVTVSSASTKGPSVFPLAPSSKSTSGGTAALGCLVKDYFPEPVTVSWNSGALTSGVHTFPAVLQSSGLYSLSSVVTVPSSSLGTQTYICNVNHKPSNTKVDKKVEPKSCDKTHTCPPCPAPELLGGPSVFLFPPKPKDTLYITREPEVTCVVVDVSHEDPEVKFNWYVDGVEVHNAKTKPREEQYGSTYRVVSVLTVLHQDWLNGKEYKCKVSNKALPAPIEKTISKAKGQPREPQVYTLPPSRDELTKNQVSLSCAVKGFYPSDIAVEWESNGQPENNYKTTPPVLDSDGSFFLVSKLTVDKSRWQQGNVFSCSVMHEALHNHYTQKSLSLSPGK

SEQ ID NO: 617 - protein, 453 aa, artificial
  Synthetic polypeptide
ELQLQESGPGLVKPSETLSLTCTVSGGSISTSSYYWGWIRQPPGKGLEWIGSIYYTGNTYYNPSLKSRVTISVDTSKNQFSLKLSSVTAADTAVYYCARVRYGVGVPRYFDPWGQGTLVTVSSASTKGPSVFPLAPSSKSTSGGTAALGCLVKDYFPEPVTVSWNSGALTSGVHTFPAVLQSSGLYSLSSVVTVPSSSLGTQTYICNVNHKPSNTKVDKKVEPKSCDKTHTCPPCPAPELLGGPSVFLFPPKPKDTLMISRTPEVTCVVVDVSHEDPEVKFNWYVDGVEVHNAKTKPREEQYGSTYRVVSVLTVLHQDWLNGKEYKCKVSNKALPAPIEKTISKAKGQPREPQVYTLPPSRDELTKNQVSLTCLVKGFYPSDIAVEWESNGQPENNYKTTPPVLDSDGSFFLYSKLTVDKSRWQQGNVFSCSVMHEALHNHYTQKSLSLSPGK

SEQ ID NO: 618 - protein, 452 aa, artificial
  Synthetic polypeptide
ELQLQESGPGLVKPSETLSLTCTVSGGSISTSSYYWGWIRQPPGKGLEWIGSIYYTGNTYYNPSLKSRVTISVDTSKNQFSLKLSSVTAADTAVYYCARVRYGVGVPRYFDPWGQGTLVTVSSASTKGPSVFPLAPSSKSTSGGTAALGCLVKDYFPEPVTVSWNSGALTSGVHTFPAVLQSSGLYSLSSVVTVPSSSLGTQTYICNVNHKPSNTKVDKKVEPKSCDKTHTCPPCPAPELLGGPSVFLFPPKPKDTYITRETPEVTCVVVDVSHEDPEVKFNWYVDGVEVHNAKTKPREEQYGSTYRVVSVLTVLHQDWLNGKEYKCKVSNKALPAPIEKTISKAKGQPREPQVYTLPPSRDELTKNQVSLTCLVKGFYPSDIAVEWESNGQPENNYKTTPPVLDSDGSFFLYSKLTVDKSRWQQGNVFSCSVMHEALHNHYTQKSLSLSPG

SEQ ID NO: 619 - protein, 453 aa, artificial
  Synthetic polypeptide
ELQLQESGPGLVKPSETLSLTCTVSGGSISTSSYYWGWIRQPPGKGLEWIGSIYYTGNTYYNPSLKSRVTISVDTSKNQFSLKLSSVTAADTAVYYCARVRYGVGVPRYFDPWGQGTLVTVSSASTKGPSVFPLAPSSKSTSGGTAALGCLVKDYFPEPVTVSWNSGALTSGVHTFPAVLQSSGLYSLSSVVTVPSSSLGTQTYICNVNHKPSNTKVDKKVEPKSCDKTHTCPPCPAPELLGGPSVFLFPPKPKDTYITRETPEVTCVVVDVSHEDPEVKFNWYVDGVEVHNAKTKPREEQYGSTYRVVSVLTVLHQDWLNGKEYKCKVSNKALPAPIEKTISKAKGQPREPQVYTLPPSRDELTKNQVSLTCLVKGFYPSDIAVEWESNGQPENNYKTTPPVLDSDGSFFLYSKLTVDKSRWQQGNVFSCSVMHEALHNHYTQKSLSLSPGK

SEQ ID NO: 620 - protein, 453 aa, artificial
  Synthetic polypeptide
ELQLQESGPGLVKPSETLSLTCTVSGGSISTSSYYWGWIRQPPGKGLEWIGSIYYTGNTYYNPSLKSRVTISVDTSKNQFSLKLSSVTAADTAVYYCARVRYGVGVPRYFDPWGQGTLVTVSSASTKGPSVFPLAPSSKSTSGGTAALGCLVKDYFPEPVTVSWNSGALTSGVHTFPAVLQSSGLYSLSSVVTVPSSSLGTQTYICNVNHKPSNTKVDKKVEPKSCDKTHTCPPCPAPELLGGPSVFLFPPKPKDTLMISRTPEVTCVVVDVSHEDPEVKFNWYVDGVEVHNAKTKPREEQYGSTYRVVSVLTVLHQDWLNGKEYKCKVSNKALPAPIEKTISKAKGQPREPQVYTLPPSRDELTKNQVSLWCLVKGFYPSDIAVEWESNGQPENNYKTTPPVLDSDGSFFLYSKLTVDKSRWQQGNVFSCSVMHEALHNHYTQKSLSLSPGK

SEQ ID NO: 621 - protein, 452 aa, artificial
  Synthetic polypeptide
ELQLQESGPGLVKPSETLSLTCTVSGGSISTSSYYWGWIRQPPGKGLEWIGSIYYTGNTYYNPSLKSRVTISVDTSKNQFSLKLSSVTAADTAVYYCARVRYGVGVPRYFDPWGQGTLVTVSSASTKGPSVFPLAPSSKSTSGGTAALGCLVKDYFPEPVTVSWNSGALTSGVHTFPAVLQSSGLYSLSSVVTVPSSSLGTQTYICNVNHKPSNTKVDKKVEPKSCDKTHTCPPCPAPELLGGPSVFLFPPKPKDTYITRETPEVTCVVVDVSHEDPEVKFNWYVDGVEVHNAKTKPREEQYGSTYRVVSVLTVLHQDWLNGKEYKCKVSNKALPAPIEKTISKAKGQPREPQVYTLPPSRDELTKNQVSLWCLVKGFYPSDIAVEWESNGQPENNYKTTPPVLDSDGSFFLYSKLTVDKSRWQQGNVFSCSVMHEALHNHYTQKSLSLSPG

SEQ ID NO: 622 - protein, 453 aa, artificial
  Synthetic polypeptide
ELQLQESGPGLVKPSETLSLTCTVSGGSISTSSYYWGWIRQPPGKGLEWIGSIYYTGNTYYNPSLKSRVTISVDTSKNQFSLKLSSVTAADTAVYYCARVRYGVGVPRYFDPWGQGTLVTVSSASTKGPSVFPLAPSSKSTSGGTAALGCLVKDYFPEPVTVSWNSGALTSGVHTFPAVLQSSGLYSLSSVVTVPSSSLGTQTYICNVNHKPSNTKVDKKVEPKSCDKTHTCPPCPAPELLGGPSVFLFPPKPKDTYITRETPEVTCVVVDVSHEDPEVKFNWYVDGVEVHNAKTKPREEQYGSTYRVVSVLTVLHQDWLNGKEYKCKVSNKALPAPIEKTISKAKGQPREPQVYTLPPSRDELTKNQVSLWCLVKGFYPSDIAVEWESNGQPENNYKTTPPVLDSDGSFFLYSKLTVDKSRWQQGNVFSCSVMHEALHNHYTQKSLSLSPGK

SEQ ID NO: 623 - protein, 453 aa, artificial
  Synthetic polypeptide
ELQLQESGPGLVKPSETLSLTCTVSGGSISTSSYYWGWIRQPPGKGLEWIGSIYYTGNTYYNPSLKSRVTISVDTSKNQFSLKLSSVTAADTAVYYCARVRYGVGVPRYFDPWGQGTLVTVSSASTKGPSVFPLAPSSKSTSGGTAALGCLVKDYFPEPVTVSWNSGALTSGVHTFPAVLQSSGLYSLSSVVTVPSSSLGTQTYICNVNHKPSNTKVDKKVEPKSCDKTHTCPPCPAPELLGGPSVFLFPPKPKDTLMISRTPEVTCVVVDVSHEDPEVKFNWYVDGVEVHNAKTKPREEQYGSTYRVVSVLTVLHQDWLNGKEYKCKVSNKALPAPIEKTISKAKGQPREPQVYTLPPSRDELTKNQVSLSCAVKGFYPSDIAVEWESNGQPENNYKTTPPVLDSDGSFFLVSKLTVDKSRWQQGNVFSCSVMHEALHNHYTQKSLSLSPGK

SEQ ID NO: 624 - protein, 452 aa, artificial
  Synthetic polypeptide
ELQLQESGPGLVKPSETLSLTCTVSGGSISTSSYYWGWIRQPPGKGLEWIGSIYYTGNTYYNPSLKSRVTISVDTSKNQFSLKLSSVTAADTAVYYCARVRYGVGVPRYFDPWGQGTLVTVSSASTKGPSVFPLAPSSKSTSGGTAALGCLVKDYFPEPVTVSWNSGALTSGVHTFPAVLQSSGLYSLSSVVTVPSSSLGTQTYICNVNHKPSNTKVDKKVEPKSCDKTHTCPPCPAPELLGGPSVFLFPPKPKDTYITRETPEVTCVVVDVSHEDPEVKFNWYVDGVEVHNAKTKPREEQYGSTYRVVSVLTVLHQDWLNGKEYKCKVSNKALPAPIEKTISKAKGQPREPQVYTLPPSRDELTKNQVSLSCAVKGFYPSDIAVEWESNGQPENNYKTTPPVLDSDGSFFLVSKLTVDKSRWQQGNVFSCSVMHEALHNHYTQKSLSLSPG

SEQ ID NO: 625 - protein, 453 aa, artificial
  Synthetic polypeptide
ELQLQESGPGLVKPSETLSLTCTVSGGSISTSSYYWGWIRQPPGKGLEWIGSIYYTGNTYYNPSLKSRVTISVDTSKNQFSLKLSSVTAADTAVYYCARVRYGVGVPRYFDPWGQGTLVTVSSASTKGPSVFPLAPSSKSTSGGTAALGCLVKDYFPEPVTVSWNSGALTSGVHTFPAVLQSSGLYSLSSVVTVPSSSLGTQTYICNVNHKPSNTKVDKKVEPKSCDKTHTCPPCPAPELLGGPSVFLFPPKPKDTYITRETPEVTCVVVDVSHEDPEVKFNWYVDGVEVHNAKTKPREEQYGSTYRVVSVLTVLHQDWLNGKEYKCKVSNKALPAPIEKTISKAKGQPREPQVYTLPPSRDELTKNQVSLSCAVKGFYPSDIAVEWESNGQPENNYKTTPPVLDSDGSFFLVSKLTVDKSRWQQGNVFSCSVMHEALHNHYTQKSLSLSPGK

SEQ ID NO: 626 - protein, 453 aa, artificial
  Synthetic polypeptide
ELQLQESGPGLVKPSETLSLTCTVSGGSISDSSYYWGWIRQPPGKGLEWIGSIYYTGNTYYNSSLKSRVTISVDTSKNQFSLKLSSVTAADTAVYYCARVRYGVGVPRYFDPWGQGTLVTVSSASTKGPSVFPLAPSSKSTSGGTAALGCLVKDYFPEPVTVSWNSGALTSGVHTFPAVLQSSGLYSLSSVVTVPSSSLGTQTYICNVNHKPSNTKVDKKVEPKSCDKTHTCPPCPAPELLGGPSVFLFPPKPKDTLMISRTPEVTCVVVDVSHEDPEVKFNWYVDGVEVHNAKTKPREEQYGSTYRVVSVLTVLHQDWLNGKEYKCKVSNKALPAPIEKTISKAKGQPREPQVYTLPPSRDELTKNQVSLTCLVKGFYPSDIAVEWESNGQPENNYKTTPPVLDSDGSFFLYSKLTVDKSRWQQGNVFSCSVMHEALHNHYTQKSLSLSPGK

SEQ ID NO: 627 - protein, 452 aa, artificial
  Synthetic polypeptide
ELQLQESGPGLVKPSETLSLTCTVSGGSISDSSYYWGWIRQPPGKGLEWIGSIYYTGNTYYNSSLKSRVTISVDTSKNQFSLKLSSVTAADTAVYYCARVRYGVGVPRYFDPWGQGTLVTVSSASTKGPSVFPLAPSSKSTSGGTAALGCLVKDYFPEPVTVSWNSGALTSGVHTFPAVLQSSGLYSLSSVVTVPSSSLGTQTYICNVNHKPSNTKVDKKVEPKSCDKTHTCPPCPAPELLGGPSVFLFPPKPKDTYITRETPEVTCVVVDVSHEDPEVKFNWYVDGVEVHNAKTKPREEQYGSTYRVVSVLTVLHQDWLNGKEYKCKVSNKALPAPIEKTISKAKGQPREPQVYTLPPSRDELTKNQVSLTCLVKGFYPSDIAVEWESNGQPENNYKTTPPVLDSDGSFFLYSKLTVDKSRWQQGNVFSCSVMHEALHNHYTQKSLSLSPG

SEQ ID NO: 628 - protein, 453 aa, artificial
  Synthetic polypeptide
ELQLQESGPGLVKPSETLSLTCTVSGGSISDSSYYWGWIRQPPGKGLEWIGSIYYTGNTYYNSSLKSRVTISVDTSKNQFSLKLSSVTAADTAVYYCARVRYGVGVPRYFDPWGQGTLVTVSSASTKGPSVFPLAPSSKSTSGGTAALGCLVKDYFPEPVTVSWNSGALTSGVHTFPAVLQSSGLYSLSSVVTVPSSSLGTQTYICNVNHKPSNTKVDKKVEPKSCDKTHTCPPCPAPELLGGPSVFLFPPKPKDTYITRETPEVTCVVVDVSHEDPEVKFNWYVDGVEVHNAKTKPREEQYGSTYRVVSVLTVLHQDWLNGKEYKCKVSNKALPAPIEKTISKAKGQPREPQVYTLPPSRDELTKNQVSLTCLVKGFYPSDIAVEWESNGQPENNYKTTPPVLDSDGSFFLYSKLTVDKSRWQQGNVFSCSVMHEALHNHYTQKSLSLSPGK

SEQ ID NO: 629 - protein, 453 aa, artificial
  Synthetic polypeptide
ELQLQESGPGLVKPSETLSLTCTVSGGSISDSSYYWGWIRQPPGKGLEWIGSIYYTGNTYYNSSLKSRVTISVDTSKNQFSLKLSSVTAADTAVYYCARVRYGVGVPRYFDPWGQGTLVTVSSASTKGPSVFPLAPSSKSTSGGTAALGCLVKDYFPEPVTVSWNSGALTSGVHTFPAVLQSSGLYSLSSVVTVPSSSLGTQTYICNVNHKPSNTKVDKKVEPKSCDKTHTCPPCPAPELLGGPSVFLFPPKPKDTLMISRTPEVTCVVVDVSHEDPEVKFNWYVDGVEVHNAKTKPREEQYGSTYRVVSVLTVLHQDWLNGKEYKCKVSNKALPAPIEKTISKAKGQPREPQVYTLPPSRDELTKNQVSLWCLVKGFYPSDIAVEWESNGQPENNYKTTPPVLDSDGSFFLYSKLTVDKSRWQQGNVFSCSVMHEALHNHYTQKSLSLSPGK

SEQ ID NO: 630 - protein, 452 aa, artificial
  Synthetic polypeptide
ELQLQESGPGLVKPSETLSLTCTVSGGSISDSSYYWGWIRQPPGKGLEWIGSIYYTGNTYYNSSLKSRVTISVDTSKNQFSLKLSSVTAADTAVYYCARVRYGVGVPRYFDPWGQGTLVTVSSASTKGPSVFPLAPSSKSTSGGTAALGCLVKDYFPEPVTVSWNSGALTSGVHTFPAVLQSSGLYSLSSVVTVPSSSLGTQTYICNVNHKPSNTKVDKKVEPKSCDKTHTCPPCPAPELLGGPSVFLFPPKPKDTYITRETPEVTCVVVDVSHEDPEVKFNWYVDGVEVHNAKTKPREEQYGSTYRVVSVLTVLHQDWLNGKEYKCKVSNKALPAPIEKTISKAKGQPREPQVYTLPPSRDELTKNQVSLWCLVKGFYPSDIAVEWESNGQPENNYKTTPPVLDSDGSFFLYSKLTVDKSRWQQGNVFSCSVMHEALHNHYTQKSLSLSPG

SEQ ID NO: 631 - protein, 453 aa, artificial
  Synthetic polypeptide
ELQLQESGPGLVKPSETLSLTCTVSGGSISDSSYYWGWIRQPPGKGLEWIGSIYYTGNTYYNSSLKSRVTISVDTSKNQFSLKLSSVTAADTAVYYCARVRYGVGVPRYFDPWGQGTLVTVSSASTKGPSVFPLAPSSKSTSGGTAALGCLVKDYFPEPVTVSWNSGALTSGVHTFPAVLQSSGLYSLSSVVTVPSSSLGTQTYICNVNHKPSNTKVDKKVEPKSCDKTHTCPPCPAPELLGGPSVFLFPPKPKDTYITRETPEVTCVVVDVSHEDPEVKFNWYVDGVEVHNAKTKPREEQYGSTYRVVSVLTVLHQDWLNGKEYKCKVSNKALPAPIEKTISKAKGQPREPQVYTLPPSRDELTKNQVSLWCLVKGFYPSDIAVEWESNGQPENNYKTTPPVLDSDGSFFLYSKLTVDKSRWQQGNVFSCSVMHEALHNHYTQKSLSLSPGK

SEQ ID NO: 632 - protein, 453 aa, artificial
  Synthetic polypeptide
ELQLQESGPGLVKPSETLSLTCTVSGGSISDSSYYWGWIRQPPGKGLEWIGSIYYTGNTYYNSSLKSRVTISVDTSKNQFSLKLSSVTAADTAVYYCARVRYGVGVPRYFDPWGQGTLVTVSSASTKGPSVFPLAPSSKSTSGGTAALGCLVKDYFPEPVTVSWNSGALTSGVHTFPAVLQSSGLYSLSSVVTVPSSSLGTQTYICNVNHKPSNTKVDKKVEPKSCDKTHTCPPCPAPELLGGPSVFLFPPKPKDTLMISRTPEVTCVVVDVSHEDPEVKFNWYVDGVEVHNAKTKPREEQYGSTYRVVSVLTVLHQDWLNGKEYKCKVSNKALPAPIEKTISKAKGQPREPQVYTLPPSRDELTKNQVSLSCAVKGFYPSDIAVEWESNGQPENNYKTTPPVLDSDGSFFLVSKLTVDKSRWQQGNVFSCSVMHEALHNHYTQKSLSLSPGK

SEQ ID NO: 633 - protein, 452 aa, artificial
  Synthetic polypeptide
ELQLQESGPGLVKPSETLSLTCTVSGGSISDSSYYWGWIRQPPGKGLEWIGSIYYTGNTYYNSSLKSRVTISVDTSKNQFSLKLSSVTAADTAVYYCARVRYGVGVPRYFDPWGQGTLVTVSSASTKGPSVFPLAPSSKSTSGGTAALGCLVKDYFPEPVTVSWNSGALTSGVHTFPAVLQSSGLYSLSSVVTVPSSSLGTQTYICNVNHKPSNTKVDKKVEPKSCDKTHTCPPCPAPELLGGPSVFLFPPKPKDTYITRETPEVTCVVVDVSHEDPEVKFNWYVDGVEVHNAKTKPREEQYGSTYRVVSVLTVLHQDWLNGKEYKCKVSNKALPAPIEKTISKAKGQPREPQVYTLPPSRDELTKNQVSLSCAVKGFYPSDIAVEWESNGQPENNYKTTPPVLDSDGSFFLVSKLTVDKSRWQQGNVFSCSVMHEALHNHYTQKSLSLSPG

SEQ ID NO: 634 - protein, 453 aa, artificial
  Synthetic polypeptide
ELQLQESGPGLVKPSETLSLTCTVSGGSISDSSYYWGWIRQPPGKGLEWIGSIYYTGNTYYNSSLKSRVTISVDTSKNQFSLKLSSVTAADTAVYYCARVRYGVGVPRYFDPWGQGTLVTVSSASTKGPSVFPLAPSSKSTSGGTAALGCLVKDYFPEPVTVSWNSGALTSGVHTFPAVLQSSGLYSLSSVVTVPSSSLGTQTYICNVNHKPSNTKVDKKVEPKSCDKTHTCPPCPAPELLGGPSVFLFPPKPKDTYITRETPEVTCVVVDVSHEDPEVKFNWYVDGVEVHNAKTKPREEQYGSTYRVVSVLTVLHQDWLNGKEYKCKVSNKALPAPIEKTISKAKGQPREPQVYTLPPSRDELTKNQVSLSCAVKGFYPSDIAVEWESNGQPENNYKTTPPVLDSDGSFFLVSKLTVDKSRWQQGNVFSCSVMHEALHNHYTQKSLSLSPGK

SEQ ID NO: 635 - protein, 453 aa, artificial
  Synthetic polypeptide
ELQLQESGPGLVKPSETLSLTCTVSGGSISESSYYWGWIRQPPGKGLEWIGSIYYTGNTYYNPSLKSRVTISVDTSKNQFSLKLSSVTAADTAVYYCAGVRYGVGVPRYFDPWGQGTLVTVSSASTKGPSVFPLAPSSKSTSGGTAALGCLVKDYFPEPVTVSWNSGALTSGVHTFPAVLQSSGLYSLSSVVTVPSSSLGTQTYICNVNHKPSNTKVDKKVEPKSCDKTHTCPPCPAPELLGGPSVFLFPPKPKDTLMISRTPEVTCVVVDVSHEDPEVKFNWYVDGVEVHNAKTKPREEQYGSTYRVVSVLTVLHQDWLNGKEYKCKVSNKALPAPIEKTISKAKGQPREPQVYTLPPSRDELTKNQVSLTCLVKGFYPSDIAVEWESNGQPENNYKTTPPVLDSDGSFFLYSKLTVDKSRWQQGNVFSCSVMHEALHNHYTQKSLSLSPGK

SEQ ID NO: 636 - protein, 452 aa, artificial
  Synthetic polypeptide
ELQLQESGPGLVKPSETLSLTCTVSGGSISESSYYWGWIRQPPGKGLEWIGSIYYTGNTYYNPSLKSRVTISVDTSKNQFSLKLSSVTAADTAVYYCAGVRYGVGVPRYFDPWGQGTLVTVSSASTKGPSVFPLAPSSKSTSGGTAALGCLVKDYFPEPVTVSWNSGALTSGVHTFPAVLQSSGLYSLSSVVTVPSSSLGTQTYICNVNHKPSNTKVDKKVEPKSCDKTHTCPPCPAPELLGGPSVFLFPPKPKDTYITRETPEVTCVVVDVSHEDPEVKFNWYVDGVEVHNAKTKPREEQYGSTYRVVSVLTVLHQDWLNGKEYKCKVSNKALPAPIEKTISKAKGQPREPQVYTLPPSRDELTKNQVSLTCLVKGFYPSDIAVEWESNGQPENNYKTTPPVLDSDGSFFLYSKLTVDKSRWQQGNVFSCSVMHEALHNHYTQKSLSLSPG

SEQ ID NO: 637 - protein, 453 aa, artificial
  Synthetic polypeptide
ELQLQESGPGLVKPSETLSLTCTVSGGSISESSYYWGWIRQPPGKGLEWIGSIYYTGNTYYNPSLKSRVTISVDTSKNQFSLKLSSVTAADTAVYYCAGVRYGVGVPRYFDPWGQGTLVTVSSASTKGPSVFPLAPSSKSTSGGTAALGCLVKDYFPEPVTVSWNSGALTSGVHTFPAVLQSSGLYSLSSVVTVPSSSLGTQTYICNVNHKPSNTKVDKKVEPKSCDKTHTCPPCPAPELLGGPSVFLFPPKPKDTYITRETPEVTCVVVDVSHEDPEVKFNWYVDGVEVHNAKTKPREEQYGSTYRVVSVLTVLHQDWLNGKEYKCKVSNKALPAPIEKTISKAKGQPREPQVYTLPPSRDELTKNQVSLTCLVKGFYPSDIAVEWESNGQPENNYKTTPPVLDSDGSFFLYSKLTVDKSRWQQGNVFSCSVMHEALHNHYTQKSLSLSPGK

SEQ ID NO: 638 - protein, 453 aa, artificial
  Synthetic polypeptide
ELQLQESGPGLVKPSETLSLTCTVSGGSISESSYYWGWIRQPPGKGLEWIGSIYYTGNTYYNPSLKSRVTISVDTSKNQFSLKLSSVTAADTAVYYCAGVRYGVGVPRYFDPWGQGTLVTVSSASTKGPSVFPLAPSSKSTSGGTAALGCLVKDYFPEPVTVSWNSGALTSGVHTFPAVLQSSGLYSLSSVVTVPSSSLGTQTYICNVNHKPSNTKVDKKVEPKSCDKTHTCPPCPAPELLGGPSVFLFPPKPKDTLMISRTPEVTCVVVDVSHEDPEVKFNWYVDGVEVHNAKTKPREEQYGSTYRVVSVLTVLHQDWLNGKEYKCKVSNKALPAPIEKTISKAKGQPREPQVYTLPPSRDELTKNQVSLWCLVKGFYPSDIAVEWESNGQPENNYKTTPPVLDSDGSFFLYSKLTVDKSRWQQGNVFSCSVMHEALHNHYTQKSLSLSPGK

SEQ ID NO: 639 - protein, 452 aa, artificial
  Synthetic polypeptide
ELQLQESGPGLVKPSETLSLTCTVSGGSISESSYYWGWIRQPPGKGLEWIGSIYYTGNTYYNPSLKSRVTISVDTSKNQFSLKLSSVTAADTAVYYCAGVRYGVGVPRYFDPWGQGTLVTVSSASTKGPSVFPLAPSSKSTSGGTAALGCLVKDYFPEPVTVSWNSGALTSGVHTFPAVLQSSGLYSLSSVVTVPSSSLGTQTYICNVNHKPSNTKVDKKVEPKSCDKTHTCPPCPAPELLGGPSVFLFPPKPKDTYITRETPEVTCVVVDVSHEDPEVKFNWYVDGVEVHNAKTKPREEQYGSTYRVVSVLTVLHQDWLNGKEYKCKVSNKALPAPIEKTISKAKGQPREPQVYTLPPSRDELTKNQVSLWCLVKGFYPSDIAVEWESNGQPENNYKTTPPVLDSDGSFFLYSKLTVDKSRWQQGNVFSCSVMHEALHNHYTQKSLSLSPG

SEQ ID NO: 640 - protein, 453 aa, artificial
  Synthetic polypeptide
ELQLQESGPGLVKPSETLSLTCTVSGGSISESSYYWGWIRQPPGKGLEWIGSIYYTGNTYYNPSLKSRVTISVDTSKNQFSLKLSSVTAADTAVYYCAGVRYGVGVPRYFDPWGQGTLVTVSSASTKGPSVFPLAPSSKSTSGGTAALGCLVKDYFPEPVTVSWNSGALTSGVHTFPAVLQSSGLYSLSSVVTVPSSSLGTQTYICNVNHKPSNTKVDKKVEPKSCDKTHTCPPCPAPELLGGPSVFLFPPKPKDTYITRETPEVTCVVVDVSHEDPEVKFNWYVDGVEVHNAKTKPREEQYGSTYRVVSVLTVLHQDWLNGKEYKCKVSNKALPAPIEKTISKAKGQPREPQVYTLPPSRDELTKNQVSLWCLVKGFYPSDIAVEWESNGQPENNYKTTPPVLDSDGSFFLYSKLTVDKSRWQQGNVFSCSVMHEALHNHYTQKSLSLSPGK

SEQ ID NO: 641 - protein, 453 aa, artificial
  Synthetic polypeptide
ELQLQESGPGLVKPSETLSLTCTVSGGSISESSYYWGWIRQPPGKGLEWIGSIYYTGNTYYNPSLKSRVTISVDTSKNQFSLKLSSVTAADTAVYYCAGVRYGVGVPRYFDPWGQGTLVTVSSASTKGPSVFPLAPSSKSTSGGTAALGCLVKDYFPEPVTVSWNSGALTSGVHTFPAVLQSSGLYSLSSVVTVPSSSLGTQTYICNVNHKPSNTKVDKKVEPKSCDKTHTCPPCPAPELLGGPSVFLFPPKPKDTLMISRTPEVTCVVVDVSHEDPEVKFNWYVDGVEVHNAKTKPREEQYGSTYRVVSVLTVLHQDWLNGKEYKCKVSNKALPAPIEKTISKAKGQPREPQVYTLPPSRDELTKNQVSLSCAVKGFYPSDIAVEWESNGQPENNYKTTPPVLDSDGSFFLVSKLTVDKSRWQQGNVFSCSVMHEALHNHYTQKSLSLSPGK

SEQ ID NO: 642 - protein, 452 aa, artificial
  Synthetic polypeptide
ELQLQESGPGLVKPSETLSLTCTVSGGSISESSYYWGWIRQPPGKGLEWIGSIYYTGNTYYNPSLKSRVTISVDTSKNQFSLKLSSVTAADTAVYYCAGVRYGVGVPRYFDPWGQGTLVTVSSASTKGPSVFPLAPSSKSTSGGTAALGCLVKDYFPEPVTVSWNSGALTSGVHTFPAVLQSSGLYSLSSVVTVPSSSLGTQTYICNVNHKPSNTKVDKKVEPKSCDKTHTCPPCPAPELLGGPSVFLFPPKPKDTYITRETPEVTCVVVDVSHEDPEVKFNWYVDGVEVHNAKTKPREEQYGSTYRVVSVLTVLHQDWLNGKEYKCKVSNKALPAPIEKTISKAKGQPREPQVYTLPPSRDELTKNQVSLSCAVKGFYPSDIAVEWESNGQPENNYKTTPPVLDSDGSFFLVSKLTVDKSRWQQGNVFSCSVMHEALHNHYTQKSLSLSPG

SEQ ID NO: 643 - protein, 453 aa, artificial
  Synthetic polypeptide
ELQLQESGPGLVKPSETLSLTCTVSGGSISESSYYWGWIRQPPGKGLEWIGSIYYTGNTYYNPSLKSRVTISVDTSKNQFSLKLSSVTAADTAVYYCAGVRYGVGVPRYFDPWGQGTLVTVSSASTKGPSVFPLAPSSKSTSGGTAALGCLVKDYFPEPVTVSWNSGALTSGVHTFPAVLQSSGLYSLSSVVTVPSSSLGTQTYICNVNHKPSNTKVDKKVEPKSCDKTHTCPPCPAPELLGGPSVFLFPPKPKDTYITRETPEVTCVVVDVSHEDPEVKFNWYVDGVEVHNAKTKPREEQYGSTYRVVSVLTVLHQDWLNGKEYKCKVSNKALPAPIEKTISKAKGQPREPQVYTLPPSRDELTKNQVSLSCAVKGFYPSDIAVEWESNGQPENNYKTTPPVLDSDGSFFLVSKLTVDKSRWQQGNVFSCSVMHEALHNHYTQKSLSLSPGK

SEQ ID NO: 644 - protein, 453 aa, artificial
  Synthetic polypeptide
ELQLQESGPGLVKPSETLSLTCTVSGGSISTSSDYWGWIRQPPGKGLEWIGSIYYTGNTYYLPSLKSRVTISVDTSKNQFSLKLSSVTAADTAVYYCSRVRYGVGVPRYFDPWGQGTLVTVSSASTKGPSVFPLAPSSKSTSGGTAALGCLVKDYFPEPVTVSWNSGALTSGVHTFPAVLQSSGLYSLSSVVTVPSSSLGTQTYICNVNHKPSNTKVDKKVEPKSCDKTHTCPPCPAPELLGGPSVFLFPPKPKDTLMISRTPEVTCVVVDVSHEDPEVKFNWYVDGVEVHNAKTKPREEQYGSTYRVVSVLTVLHQDWLNGKEYKCKVSNKALPAPIEKTISKAKGQPREPQVYTLPPSRDELTKNQVSLTCLVKGFYPSDIAVEWESNGQPENNYKTTPPVLDSDGSFFLYSKLTVDKSRWQQGNVFSCSVMHEALHNHYTQKSLSLSPGK

SEQ ID NO: 645 - protein, 452 aa, artificial
  Synthetic polypeptide
ELQLQESGPGLVKPSETLSLTCTVSGGSISTSSDYWGWIRQPPGKGLEWIGSIYYTGNTYYLPSLKSRVTISVDTSKNQFSLKLSSVTAADTAVYYCSRVRYGVGVPRYFDPWGQGTLVTVSSASTKGPSVFPLAPSSKSTSGGTAALGCLVKDYFPEPVTVSWNSGALTSGVHTFPAVLQSSGLYSLSSVVTVPSSSLGTQTYICNVNHKPSNTKVDKKVEPKSCDKTHTCPPCPAPELLGGPSVFLFPPKPKDTYITRETPEVTCVVVDVSHEDPEVKFNWYVDGVEVHNAKTKPREEQYGSTYRVVSVLTVLHQDWLNGKEYKCKVSNKALPAPIEKTISKAKGQPREPQVYTLPPSRDELTKNQVSLTCLVKGFYPSDIAVEWESNGQPENNYKTTPPVLDSDGSFFLYSKLTVDKSRWQQGNVFSCSVMHEALHNHYTQKSLSLSPG

SEQ ID NO: 646 - protein, 453 aa, artificial
  Synthetic polypeptide
ELQLQESGPGLVKPSETLSLTCTVSGGSISTSSDYWGWIRQPPGKGLEWIGSIYYTGNTYYLPSLKSRVTISVDTSKNQFSLKLSSVTAADTAVYYCSRVRYGVGVPRYFDPWGQGTLVTVSSASTKGPSVFPLAPSSKSTSGGTAALGCLVKDYFPEPVTVSWNSGALTSGVHTFPAVLQSSGLYSLSSVVTVPSSSLGTQTYICNVNHKPSNTKVDKKVEPKSCDKTHTCPPCPAPELLGGPSVFLFPPKPKDTYITRETPEVTCVVVDVSHEDPEVKFNWYVDGVEVHNAKTKPREEQYGSTYRVVSVLTVLHQDWLNGKEYKCKVSNKALPAPIEKTISKAKGQPREPQVYTLPPSRDELTKNQVSLTCLVKGFYPSDIAVEWESNGQPENNYKTTPPVLDSDGSFFLYSKLTVDKSRWQQGNVFSCSVMHEALHNHYTQKSLSLSPGK

SEQ ID NO: 647 - protein, 453 aa, artificial
  Synthetic polypeptide
ELQLQESGPGLVKPSETLSLTCTVSGGSISTSSDYWGWIRQPPGKGLEWIGSIYYTGNTYYLPSLKSRVTISVDTSKNQFSLKLSSVTAADTAVYYCSRVRYGVGVPRYFDPWGQGTLVTVSSASTKGPSVFPLAPSSKSTSGGTAALGCLVKDYFPEPVTVSWNSGALTSGVHTFPAVLQSSGLYSLSSVVTVPSSSLGTQTYICNVNHKPSNTKVDKKVEPKSCDKTHTCPPCPAPELLGGPSVFLFPPKPKDTLMISRTPEVTCVVVDVSHEDPEVKFNWYVDGVEVHNAKTKPREEQYGSTYRVVSVLTVLHQDWLNGKEYKCKVSNKALPAPIEKTISKAKGQPREPQVYTLPPSRDELTKNQVSLWCLVKGFYPSDIAVEWESNGQPENNYKTTPPVLDSDGSFFLYSKLTVDKSRWQQGNVFSCSVMHEALHNHYTQKSLSLSPGK

SEQ ID NO: 648 - protein, 452 aa, artificial
  Synthetic polypeptide
ELQLQESGPGLVKPSETLSLTCTVSGGSISTSSDYWGWIRQPPGKGLEWIGSIYYTGNTYYLPSLKSRVTISVDTSKNQFSLKLSSVTAADTAVYYCSRVRYGVGVPRYFDPWGQGTLVTVSSASTKGPSVFPLAPSSKSTSGGTAALGCLVKDYFPEPVTVSWNSGALTSGVHTFPAVLQSSGLYSLSSVVTVPSSSLGTQTYICNVNHKPSNTKVDKKVEPKSCDKTHTCPPCPAPELLGGPSVFLFPPKPKDTYITRETPEVTCVVVDVSHEDPEVKFNWYVDGVEVHNAKTKPREEQYGSTYRVVSVLTVLHQDWLNGKEYKCKVSNKALPAPIEKTISKAKGQPREPQVYTLPPSRDELTKNQVSLWCLVKGFYPSDIAVEWESNGQPENNYKTTPPVLDSDGSFFLYSKLTVDKSRWQQGNVFSCSVMHEALHNHYTQKSLSLSPG

SEQ ID NO: 649 - protein, 453 aa, artificial
  Synthetic polypeptide
ELQLQESGPGLVKPSETLSLTCTVSGGSISTSSDYWGWIRQPPGKGLEWIGSIYYTGNTYYLPSLKSRVTISVDTSKNQFSLKLSSVTAADTAVYYCSRVRYGVGVPRYFDPWGQGTLVTVSSASTKGPSVFPLAPSSKSTSGGTAALGCLVKDYFPEPVTVSWNSGALTSGVHTFPAVLQSSGLYSLSSVVTVPSSSLGTQTYICNVNHKPSNTKVDKKVEPKSCDKTHTCPPCPAPELLGGPSVFLFPPKPKDTYITRETPEVTCVVVDVSHEDPEVKFNWYVDGVEVHNAKTKPREEQYGSTYRVVSVLTVLHQDWLNGKEYKCKVSNKALPAPIEKTISKAKGQPREPQVYTLPPSRDELTKNQVSLWCLVKGFYPSDIAVEWESNGQPENNYKTTPPVLDSDGSFFLYSKLTVDKSRWQQGNVFSCSVMHEALHNHYTQKSLSLSPGK

SEQ ID NO: 650 - protein, 453 aa, artificial
  Synthetic polypeptide
ELQLQESGPGLVKPSETLSLTCTVSGGSISTSSDYWGWIRQPPGKGLEWIGSIYYTGNTYYLPSLKSRVTISVDTSKNQFSLKLSSVTAADTAVYYCSRVRYGVGVPRYFDPWGQGTLVTVSSASTKGPSVFPLAPSSKSTSGGTAALGCLVKDYFPEPVTVSWNSGALTSGVHTFPAVLQSSGLYSLSSVVTVPSSSLGTQTYICNVNHKPSNTKVDKKVEPKSCDKTHTCPPCPAPELLGGPSVFLFPPKPKDTLMISRTPEVTCVVVDVSHEDPEVKFNWYVDGVEVHNAKTKPREEQYGSTYRVVSVLTVLHQDWLNGKEYKCKVSNKALPAPIEKTISKAKGQPREPQVYTLPPSRDELTKNQVSLSCAVKGFYPSDIAVEWESNGQPENNYKTTPPVLDSDGSFFLVSKLTVDKSRWQQGNVFSCSVMHEALHNHYTQKSLSLSPGK

SEQ ID NO: 651 - protein, 452 aa, artificial
  Synthetic polypeptide
ELQLQESGPGLVKPSETLSLTCTVSGGSISTSSDYWGWIRQPPGKGLEWIGSIYYTGNTYYLPSLKSRVTISVDTSKNQFSLKLSSVTAADTAVYYCSRVRYGVGVPRYFDPWGQGTLVTVSSASTKGPSVFPLAPSSKSTSGGTAALGCLVKDYFPEPVTVSWNSGALTSGVHTFPAVLQSSGLYSLSSVVTVPSSSLGTQTYICNVNHKPSNTKVDKKVEPKSCDKTHTCPPCPAPELLGGPSVFLFPPKPKDTYITRETPEVTCVVVDVSHEDPEVKFNWYVDGVEVHNAKTKPREEQYGSTYRVVSVLTVLHQDWLNGKEYKCKVSNKALPAPIEKTISKAKGQPREPQVYTLPPSRDELTKNQVSLSCAVKGFYPSDIAVEWESNGQPENNYKTTPPVLDSDGSFFLVSKLTVDKSRWQQGNVFSCSVMHEALHNHYTQKSLSLSPG

SEQ ID NO: 652 - protein, 453 aa, artificial
  Synthetic polypeptide
ELQLQESGPGLVKPSETLSLTCTVSGGSISTSSDYWGWIRQPPGKGLEWIGSIYYTGNTYYLPSLKSRVTISVDTSKNQFSLKLSSVTAADTAVYYCSRVRYGVGVPRYFDPWGQGTLVTVSSASTKGPSVFPLAPSSKSTSGGTAALGCLVKDYFPEPVTVSWNSGALTSGVHTFPAVLQSSGLYSLSSVVTVPSSSLGTQTYICNVNHKPSNTKVDKKVEPKSCDKTHTCPPCPAPELLGGPSVFLFPPKPKDTYITRETPEVTCVVVDVSHEDPEVKFNWYVDGVEVHNAKTKPREEQYGSTYRVVSVLTVLHQDWLNGKEYKCKVSNKALPAPIEKTISKAKGQPREPQVYTLPPSRDELTKNQVSLSCAVKGFYPSDIAVEWESNGQPENNYKTTPPVLDSDGSFFLVSKLTVDKSRWQQGNVFSCSVMHEALHNHYTQKSLSLSPGK

SEQ ID NO: 653 - protein, 453 aa, artificial
  Synthetic polypeptide
ELQLQESGPGLVKPSETLSLTCTVSGGSISNSSYYWGWIRQPPGKGLEWIGSIYYTGNTYYLPSLKSRVTISVDTSKNQFSLKLSSVTAADTAVYYCARVRYGVGVPRYFDPWGQGTLVTVSSASTKGPSVFPLAPSSKSTSGGTAALGCLVKDYFPEPVTVSWNSGALTSGVHTFPAVLQSSGLYSLSSVVTVPSSSLGTQTYICNVNHKPSNTKVDKKVEPKSCDKTHTCPPCPAPELLGGPSVFLFPPKPKDTLMISRTPEVTCVVVDVSHEDPEVKFNWYVDGVEVHNAKTKPREEQYGSTYRVVSVLTVLHQDWLNGKEYKCKVSNKALPAPIEKTISKAKGQPREPQVYTLPPSRDELTKNQVSLTCLVKGFYPSDIAVEWESNGQPENNYKTTPPVLDSDGSFFLYSKLTVDKSRWQQGNVFSCSVMHEALHNHYTQKSLSLSPGK

SEQ ID NO: 654 - protein, 452 aa, artificial
  Synthetic polypeptide
ELQLQESGPGLVKPSETLSLTCTVSGGSISNSSYYWGWIRQPPGKGLEWIGSIYYTGNTYYLPSLKSRVTISVDTSKNQFSLKLSSVTAADTAVYYCARVRYGVGVPRYFDPWGQGTLVTVSSASTKGPSVFPLAPSSKSTSGGTAALGCLVKDYFPEPVTVSWNSGALTSGVHTFPAVLQSSGLYSLSSVVTVPSSSLGTQTYICNVNHKPSNTKVDKKVEPKSCDKTHTCPPCPAPELLGGPSVFLFPPKPKDTYITRETPEVTCVVVDVSHEDPEVKFNWYVDGVEVHNAKTKPREEQYGSTYRVVSVLTVLHQDWLNGKEYKCKVSNKALPAPIEKTISKAKGQPREPQVYTLPPSRDELTKNQVSLTCLVKGFYPSDIAVEWESNGQPENNYKTTPPVLDSDGSFFLYSKLTVDKSRWQQGNVFSCSVMHEALHNHYTQKSLSLSPG

SEQ ID NO: 655 - protein, 453 aa, artificial
  Synthetic polypeptide
ELQLQESGPGLVKPSETLSLTCTVSGGSISNSSYYWGWIRQPPGKGLEWIGSIYYTGNTYYLPSLKSRVTISVDTSKNQFSLKLSSVTAADTAVYYCARVRYGVGVPRYFDPWGQGTLVTVSSASTKGPSVFPLAPSSKSTSGGTAALGCLVKDYFPEPVTVSWNSGALTSGVHTFPAVLQSSGLYSLSSVVTVPSSSLGTQTYICNVNHKPSNTKVDKKVEPKSCDKTHTCPPCPAPELLGGPSVFLFPPKPKDTYITRETPEVTCVVVDVSHEDPEVKFNWYVDGVEVHNAKTKPREEQYGSTYRVVSVLTVLHQDWLNGKEYKCKVSNKALPAPIEKTISKAKGQPREPQVYTLPPSRDELTKNQVSLTCLVKGFYPSDIAVEWESNGQPENNYKTTPPVLDSDGSFFLYSKLTVDKSRWQQGNVFSCSVMHEALHNHYTQKSLSLSPGK

SEQ ID NO: 656 - protein, 453 aa, artificial
  Synthetic polypeptide
ELQLQESGPGLVKPSETLSLTCTVSGGSISNSSYYWGWIRQPPGKGLEWIGSIYYTGNTYYLPSLKSRVTISVDTSKNQFSLKLSSVTAADTAVYYCARVRYGVGVPRYFDPWGQGTLVTVSSASTKGPSVFPLAPSSKSTSGGTAALGCLVKDYFPEPVTVSWNSGALTSGVHTFPAVLQSSGLYSLSSVVTVPSSSLGTQTYICNVNHKPSNTKVDKKVEPKSCDKTHTCPPCPAPELLGGPSVFLFPPKPKDTLMISRTPEVTCVVVDVSHEDPEVKFNWYVDGVEVHNAKTKPREEQYGSTYRVVSVLTVLHQDWLNGKEYKCKVSNKALPAPIEKTISKAKGQPREPQVYTLPPSRDELTKNQVSLWCLVKGFYPSDIAVEWESNGQPENNYKTTPPVLDSDGSFFLYSKLTVDKSRWQQGNVFSCSVMHEALHNHYTQKSLSLSPGK

SEQ ID NO: 657 - protein, 452 aa, artificial
  Synthetic polypeptide
ELQLQESGPGLVKPSETLSLTCTVSGGSISNSSYYWGWIRQPPGKGLEWIGSIYYTGNTYYLPSLKSRVTISVDTSKNQFSLKLSSVTAADTAVYYCARVRYGVGVPRYFDPWGQGTLVTVSSASTKGPSVFPLAPSSKSTSGGTAALGCLVKDYFPEPVTVSWNSGALTSGVHTFPAVLQSSGLYSLSSVVTVPSSSLGTQTYICNVNHKPSNTKVDKKVEPKSCDKTHTCPPCPAPELLGGPSVFLFPPKPKDTYITRETPEVTCVVVDVSHEDPEVKFNWYVDGVEVHNAKTKPREEQYGSTYRVVSVLTVLHQDWLNGKEYKCKVSNKALPAPIEKTISKAKGQPREPQVYTLPPSRDELTKNQVSLWCLVKGFYPSDIAVEWESNGQPENNYKTTPPVLDSDGSFFLYSKLTVDKSRWQQGNVFSCSVMHEALHNHYTQKSLSLSPG

SEQ ID NO: 658 - protein, 453 aa, artificial
  Synthetic polypeptide
ELQLQESGPGLVKPSETLSLTCTVSGGSISNSSYYWGWIRQPPGKGLEWIGSIYYTGNTYYLPSLKSRVTISVDTSKNQFSLKLSSVTAADTAVYYCARVRYGVGVPRYFDPWGQGTLVTVSSASTKGPSVFPLAPSSKSTSGGTAALGCLVKDYFPEPVTVSWNSGALTSGVHTFPAVLQSSGLYSLSSVVTVPSSSLGTQTYICNVNHKPSNTKVDKKVEPKSCDKTHTCPPCPAPELLGGPSVFLFPPKPKDTYITRETPEVTCVVVDVSHEDPEVKFNWYVDGVEVHNAKTKPREEQYGSTYRVVSVLTVLHQDWLNGKEYKCKVSNKALPAPIEKTISKAKGQPREPQVYTLPPSRDELTKNQVSLWCLVKGFYPSDIAVEWESNGQPENNYKTTPPVLDSDGSFFLYSKLTVDKSRWQQGNVFSCSVMHEALHNHYTQKSLSLSPGK

SEQ ID NO: 659 - protein, 453 aa, artificial
  Synthetic polypeptide
ELQLQESGPGLVKPSETLSLTCTVSGGSISNSSYYWGWIRQPPGKGLEWIGSIYYTGNTYYLPSLKSRVTISVDTSKNQFSLKLSSVTAADTAVYYCARVRYGVGVPRYFDPWGQGTLVTVSSASTKGPSVFPLAPSSKSTSGGTAALGCLVKDYFPEPVTVSWNSGALTSGVHTFPAVLQSSGLYSLSSVVTVPSSSLGTQTYICNVNHKPSNTKVDKKVEPKSCDKTHTCPPCPAPELLGGPSVFLFPPKPKDTLMISRTPEVTCVVVDVSHEDPEVKFNWYVDGVEVHNAKTKPREEQYGSTYRVVSVLTVLHQDWLNGKEYKCKVSNKALPAPIEKTISKAKGQPREPQVYTLPPSRDELTKNQVSLSCAVKGFYPSDIAVEWESNGQPENNYKTTPPVLDSDGSFFLVSKLTVDKSRWQQGNVFSCSVMHEALHNHYTQKSLSLSPGK

SEQ ID NO: 660 - protein, 452 aa, artificial
  Synthetic polypeptide
ELQLQESGPGLVKPSETLSLTCTVSGGSISNSSYYWGWIRQPPGKGLEWIGSIYYTGNTYYLPSLKSRVTISVDTSKNQFSLKLSSVTAADTAVYYCARVRYGVGVPRYFDPWGQGTLVTVSSASTKGPSVFPLAPSSKSTSGGTAALGCLVKDYFPEPVTVSWNSGALTSGVHTFPAVLQSSGLYSLSSVVTVPSSSLGTQTYICNVNHKPSNTKVDKKVEPKSCDKTHTCPPCPAPELLGGPSVFLFPPKPKDTYITRETPEVTCVVVDVSHEDPEVKFNWYVDGVEVHNAKTKPREEQYGSTYRVVSVLTVLHQDWLNGKEYKCKVSNKALPAPIEKTISKAKGQPREPQVYTLPPSRDELTKNQVSLSCAVKGFYPSDIAVEWESNGQPENNYKTTPPVLDSDGSFFLVSKLTVDKSRWQQGNVFSCSVMHEALHNHYTQKSLSLSPG

SEQ ID NO: 661 - protein, 453 aa, artificial
  Synthetic polypeptide
ELQLQESGPGLVKPSETLSLTCTVSGGSISNSSYYWGWIRQPPGKGLEWIGSIYYTGNTYYLPSLKSRVTISVDTSKNQFSLKLSSVTAADTAVYYCARVRYGVGVPRYFDPWGQGTLVTVSSASTKGPSVFPLAPSSKSTSGGTAALGCLVKDYFPEPVTVSWNSGALTSGVHTFPAVLQSSGLYSLSSVVTVPSSSLGTQTYICNVNHKPSNTKVDKKVEPKSCDKTHTCPPCPAPELLGGPSVFLFPPKPKDTYITRETPEVTCVVVDVSHEDPEVKFNWYVDGVEVHNAKTKPREEQYGSTYRVVSVLTVLHQDWLNGKEYKCKVSNKALPAPIEKTISKAKGQPREPQVYTLPPSRDELTKNQVSLSCAVKGFYPSDIAVEWESNGQPENNYKTTPPVLDSDGSFFLVSKLTVDKSRWQQGNVFSCSVMHEALHNHYTQKSLSLSPGK

SEQ ID NO: 662 - protein, 453 aa, artificial
  Synthetic polypeptide
ELQLQESGPGLVKPSETLSLTCTVSGGSISESSYYWGWIRQPPGKGLEWIGSIYYTGNTYYLPSLKSRVTISVDTSKNQFSLKLSSVTAADTAVYYCARVRYGVGVPRYFDPWGQGTLVTVSSASTKGPSVFPLAPSSKSTSGGTAALGCLVKDYFPEPVTVSWNSGALTSGVHTFPAVLQSSGLYSLSSVVTVPSSSLGTQTYICNVNHKPSNTKVDKKVEPKSCDKTHTCPPCPAPELLGGPSVFLFPPKPKDTLMISRTPEVTCVVVDVSHEDPEVKFNWYVDGVEVHNAKTKPREEQYGSTYRVVSVLTVLHQDWLNGKEYKCKVSNKALPAPIEKTISKAKGQPREPQVYTLPPSRDELTKNQVSLTCLVKGFYPSDIAVEWESNGQPENNYKTTPPVLDSDGSFFLYSKLTVDKSRWQQGNVFSCSVMHEALHNHYTQKSLSLSPGK

SEQ ID NO: 663 - protein, 452 aa, artificial
  Synthetic polypeptide
ELQLQESGPGLVKPSETLSLTCTVSGGSISESSYYWGWIRQPPGKGLEWIGSIYYTGNTYYLPSLKSRVTISVDTSKNQFSLKLSSVTAADTAVYYCARVRYGVGVPRYFDPWGQGTLVTVSSASTKGPSVFPLAPSSKSTSGGTAALGCLVKDYFPEPVTVSWNSGALTSGVHTFPAVLQSSGLYSLSSVVTVPSSSLGTQTYICNVNHKPSNTKVDKKVEPKSCDKTHTCPPCPAPELLGGPSVFLFPPKPKDTYITRETPEVTCVVVDVSHEDPEVKFNWYVDGVEVHNAKTKPREEQYGSTYRVVSVLTVLHQDWLNGKEYKCKVSNKALPAPIEKTISKAKGQPREPQVYTLPPSRDELTKNQVSLTCLVKGFYPSDIAVEWESNGQPENNYKTTPPVLDSDGSFFLYSKLTVDKSRWQQGNVFSCSVMHEALHNHYTQKSLSLSPG

SEQ ID NO: 664 - protein, 453 aa, artificial
  Synthetic polypeptide
ELQLQESGPGLVKPSETLSLTCTVSGGSISESSYYWGWIRQPPGKGLEWIGSIYYTGNTYYLPSLKSRVTISVDTSKNQFSLKLSSVTAADTAVYYCARVRYGVGVPRYFDPWGQGTLVTVSSASTKGPSVFPLAPSSKSTSGGTAALGCLVKDYFPEPVTVSWNSGALTSGVHTFPAVLQSSGLYSLSSVVTVPSSSLGTQTYICNVNHKPSNTKVDKKVEPKSCDKTHTCPPCPAPELLGGPSVFLFPPKPKDTYITRETPEVTCVVVDVSHEDPEVKFNWYVDGVEVHNAKTKPREEQYGSTYRVVSVLTVLHQDWLNGKEYKCKVSNKALPAPIEKTISKAKGQPREPQVYTLPPSRDELTKNQVSLTCLVKGFYPSDIAVEWESNGQPENNYKTTPPVLDSDGSFFLYSKLTVDKSRWQQGNVFSCSVMHEALHNHYTQKSLSLSPGK

SEQ ID NO: 665 - protein, 453 aa, artificial
  Synthetic polypeptide
ELQLQESGPGLVKPSETLSLTCTVSGGSISESSYYWGWIRQPPGKGLEWIGSIYYTGNTYYLPSLKSRVTISVDTSKNQFSLKLSSVTAADTAVYYCARVRYGVGVPRYFDPWGQGTLVTVSSASTKGPSVFPLAPSSKSTSGGTAALGCLVKDYFPEPVTVSWNSGALTSGVHTFPAVLQSSGLYSLSSVVTVPSSSLGTQTYICNVNHKPSNTKVDKKVEPKSCDKTHTCPPCPAPELLGGPSVFLFPPKPKDTLMISRTPEVTCVVVDVSHEDPEVKFNWYVDGVEVHNAKTKPREEQYGSTYRVVSVLTVLHQDWLNGKEYKCKVSNKALPAPIEKTISKAKGQPREPQVYTLPPSRDELTKNQVSLWCLVKGFYPSDIAVEWESNGQPENNYKTTPPVLDSDGSFFLYSKLTVDKSRWQQGNVFSCSVMHEALHNHYTQKSLSLSPGK

SEQ ID NO: 666 - protein, 452 aa, artificial
  Synthetic polypeptide
ELQLQESGPGLVKPSETLSLTCTVSGGSISESSYYWGWIRQPPGKGLEWIGSIYYTGNTYYLPSLKSRVTISVDTSKNQFSLKLSSVTAADTAVYYCARVRYGVGVPRYFDPWGQGTLVTVSSASTKGPSVFPLAPSSKSTSGGTAALGCLVKDYFPEPVTVSWNSGALTSGVHTFPAVLQSSGLYSLSSVVTVPSSSLGTQTYICNVNHKPSNTKVDKKVEPKSCDKTHTCPPCPAPELLGGPSVFLFPPKPKDTYITRETPEVTCVVVDVSHEDPEVKFNWYVDGVEVHNAKTKPREEQYGSTYRVVSVLTVLHQDWLNGKEYKCKVSNKALPAPIEKTISKAKGQPREPQVYTLPPSRDELTKNQVSLWCLVKGFYPSDIAVEWESNGQPENNYKTTPPVLDSDGSFFLYSKLTVDKSRWQQGNVFSCSVMHEALHNHYTQKSLSLSPG

SEQ ID NO: 667 - protein, 453 aa, artificial
  Synthetic polypeptide
ELQLQESGPGLVKPSETLSLTCTVSGGSISESSYYWGWIRQPPGKGLEWIGSIYYTGNTYYLPSLKSRVTISVDTSKNQFSLKLSSVTAADTAVYYCARVRYGVGVPRYFDPWGQGTLVTVSSASTKGPSVFPLAPSSKSTSGGTAALGCLVKDYFPEPVTVSWNSGALTSGVHTFPAVLQSSGLYSLSSVVTVPSSSLGTQTYICNVNHKPSNTKVDKKVEPKSCDKTHTCPPCPAPELLGGPSVFLFPPKPKDTYITRETPEVTCVVVDVSHEDPEVKFNWYVDGVEVHNAKTKPREEQYGSTYRVVSVLTVLHQDWLNGKEYKCKVSNKALPAPIEKTISKAKGQPREPQVYTLPPSRDELTKNQVSLWCLVKGFYPSDIAVEWESNGQPENNYKTTPPVLDSDGSFFLYSKLTVDKSRWQQGNVFSCSVMHEALHNHYTQKSLSLSPGK

SEQ ID NO: 668 - protein, 453 aa, artificial
  Synthetic polypeptide
ELQLQESGPGLVKPSETLSLTCTVSGGSISESSYYWGWIRQPPGKGLEWIGSIYYTGNTYYLPSLKSRVTISVDTSKNQFSLKLSSVTAADTAVYYCARVRYGVGVPRYFDPWGQGTLVTVSSASTKGPSVFPLAPSSKSTSGGTAALGCLVKDYFPEPVTVSWNSGALTSGVHTFPAVLQSSGLYSLSSVVTVPSSSLGTQTYICNVNHKPSNTKVDKKVEPKSCDKTHTCPPCPAPELLGGPSVFLFPPKPKDTLMISRTPEVTCVVVDVSHEDPEVKFNWYVDGVEVHNAKTKPREEQYGSTYRVVSVLTVLHQDWLNGKEYKCKVSNKALPAPIEKTISKAKGQPREPQVYTLPPSRDELTKNQVSLSCAVKGFYPSDIAVEWESNGQPENNYKTTPPVLDSDGSFFLVSKLTVDKSRWQQGNVFSCSVMHEALHNHYTQKSLSLSPGK

SEQ ID NO: 669 - protein, 452 aa, artificial
  Synthetic polypeptide
ELQLQESGPGLVKPSETLSLTCTVSGGSISESSYYWGWIRQPPGKGLEWIGSIYYTGNTYYLPSLKSRVTISVDTSKNQFSLKLSSVTAADTAVYYCARVRYGVGVPRYFDPWGQGTLVTVSSASTKGPSVFPLAPSSKSTSGGTAALGCLVKDYFPEPVTVSWNSGALTSGVHTFPAVLQSSGLYSLSSVVTVPSSSLGTQTYICNVNHKPSNTKVDKKVEPKSCDKTHTCPPCPAPELLGGPSVFLFPPKPKDTYITRETPEVTCVVVDVSHEDPEVKFNWYVDGVEVHNAKTKPREEQYGSTYRVVSVLTVLHQDWLNGKEYKCKVSNKALPAPIEKTISKAKGQPREPQVYTLPPSRDELTKNQVSLSCAVKGFYPSDIAVEWESNGQPENNYKTTPPVLDSDGSFFLVSKLTVDKSRWQQGNVFSCSVMHEALHNHYTQKSLSLSPG

SEQ ID NO: 670 - protein, 453 aa, artificial
  Synthetic polypeptide
ELQLQESGPGLVKPSETLSLTCTVSGGSISESSYYWGWIRQPPGKGLEWIGSIYYTGNTYYLPSLKSRVTISVDTSKNQFSLKLSSVTAADTAVYYCARVRYGVGVPRYFDPWGQGTLVTVSSASTKGPSVFPLAPSSKSTSGGTAALGCLVKDYFPEPVTVSWNSGALTSGVHTFPAVLQSSGLYSLSSVVTVPSSSLGTQTYICNVNHKPSNTKVDKKVEPKSCDKTHTCPPCPAPELLGGPSVFLFPPKPKDTYITRETPEVTCVVVDVSHEDPEVKFNWYVDGVEVHNAKTKPREEQYGSTYRVVSVLTVLHQDWLNGKEYKCKVSNKALPAPIEKTISKAKGQPREPQVYTLPPSRDELTKNQVSLSCAVKGFYPSDIAVEWESNGQPENNYKTTPPVLDSDGSFFLVSKLTVDKSRWQQGNVFSCSVMHEALHNHYTQKSLSLSPGK

SEQ ID NO: 671 - protein, 453 aa, artificial
  Synthetic polypeptide
ELQLQESGPGLVKPSETLSLTCTVSGGSISTSSYHWGWIRQPPGKGLEWIGSIYYTGNTYYMPSLKSRVTISVDTSKNQFSLKLSSVTAADTAVYYCVRVRYGVGVPRYFDPWGQGTLVTVSSASTKGPSVFPLAPSSKSTSGGTAALGCLVKDYFPEPVTVSWNSGALTSGVHTFPAVLQSSGLYSLSSVVTVPSSSLGTQTYICNVNHKPSNTKVDKKVEPKSCDKTHTCPPCPAPELLGGPSVFLFPPKPKDTLMISRTPEVTCVVVDVSHEDPEVKFNWYVDGVEVHNAKTKPREEQYGSTYRVVSVLTVLHQDWLNGKEYKCKVSNKALPAPIEKTISKAKGQPREPQVYTLPPSRDELTKNQVSLTCLVKGFYPSDIAVEWESNGQPENNYKTTPPVLDSDGSFFLYSKLTVDKSRWQQGNVFSCSVMHEALHNHYTQKSLSLSPGK

SEQ ID NO: 672 - protein, 452 aa, artificial
  Synthetic polypeptide
ELQLQESGPGLVKPSETLSLTCTVSGGSISTSSYHWGWIRQPPGKGLEWIGSIYYTGNTYYMPSLKSRVTISVDTSKNQFSLKLSSVTAADTAVYYCVRVRYGVGVPRYFDPWGQGTLVTVSSASTKGPSVFPLAPSSKSTSGGTAALGCLVKDYFPEPVTVSWNSGALTSGVHTFPAVLQSSGLYSLSSVVTVPSSSLGTQTYICNVNHKPSNTKVDKKVEPKSCDKTHTCPPCPAPELLGGPSVFLFPPKPKDTYITRETPEVTCVVVDVSHEDPEVKFNWYVDGVEVHNAKTKPREEQYGSTYRVVSVLTVLHQDWLNGKEYKCKVSNKALPAPIEKTISKAKGQPREPQVYTLPPSRDELTKNQVSLTCLVKGFYPSDIAVEWESNGQPENNYKTTPPVLDSDGSFFLYSKLTVDKSRWQQGNVFSCSVMHEALHNHYTQKSLSLSPG

SEQ ID NO: 673 - protein, 453 aa, artificial
  Synthetic polypeptide
ELQLQESGPGLVKPSETLSLTCTVSGGSISTSSYHWGWIRQPPGKGLEWIGSIYYTGNTYYMPSLKSRVTISVDTSKNQFSLKLSSVTAADTAVYYCVRVRYGVGVPRYFDPWGQGTLVTVSSASTKGPSVFPLAPSSKSTSGGTAALGCLVKDYFPEPVTVSWNSGALTSGVHTFPAVLQSSGLYSLSSVVTVPSSSLGTQTYICNVNHKPSNTKVDKKVEPKSCDKTHTCPPCPAPELLGGPSVFLFPPKPKDTYITRETPEVTCVVVDVSHEDPEVKFNWYVDGVEVHNAKTKPREEQYGSTYRVVSVLTVLHQDWLNGKEYKCKVSNKALPAPIEKTISKAKGQPREPQVYTLPPSRDELTKNQVSLTCLVKGFYPSDIAVEWESNGQPENNYKTTPPVLDSDGSFFLYSKLTVDKSRWQQGNVFSCSVMHEALHNHYTQKSLSLSPGK

SEQ ID NO: 674 - protein, 453 aa, artificial
  Synthetic polypeptide
ELQLQESGPGLVKPSETLSLTCTVSGGSISTSSYHWGWIRQPPGKGLEWIGSIYYTGNTYYMPSLKSRVTISVDTSKNQFSLKLSSVTAADTAVYYCVRVRYGVGVPRYFDPWGQGTLVTVSSASTKGPSVFPLAPSSKSTSGGTAALGCLVKDYFPEPVTVSWNSGALTSGVHTFPAVLQSSGLYSLSSVVTVPSSSLGTQTYICNVNHKPSNTKVDKKVEPKSCDKTHTCPPCPAPELLGGPSVFLFPPKPKDTLMISRTPEVTCVVVDVSHEDPEVKFNWYVDGVEVHNAKTKPREEQYGSTYRVVSVLTVLHQDWLNGKEYKCKVSNKALPAPIEKTISKAKGQPREPQVYTLPPSRDELTKNQVSLWCLVKGFYPSDIAVEWESNGQPENNYKTTPPVLDSDGSFFLYSKLTVDKSRWQQGNVFSCSVMHEALHNHYTQKSLSLSPGK

SEQ ID NO: 675 - protein, 452 aa, artificial
  Synthetic polypeptide
ELQLQESGPGLVKPSETLSLTCTVSGGSISTSSYHWGWIRQPPGKGLEWIGSIYYTGNTYYMPSLKSRVTISVDTSKNQFSLKLSSVTAADTAVYYCVRVRYGVGVPRYFDPWGQGTLVTVSSASTKGPSVFPLAPSSKSTSGGTAALGCLVKDYFPEPVTVSWNSGALTSGVHTFPAVLQSSGLYSLSSVVTVPSSSLGTQTYICNVNHKPSNTKVDKKVEPKSCDKTHTCPPCPAPELLGGPSVFLFPPKPKDTYITRETPEVTCVVVDVSHEDPEVKFNWYVDGVEVHNAKTKPREEQYGSTYRVVSVLTVLHQDWLNGKEYKCKVSNKALPAPIEKTISKAKGQPREPQVYTLPPSRDELTKNQVSLWCLVKGFYPSDIAVEWESNGQPENNYKTTPPVLDSDGSFFLYSKLTVDKSRWQQGNVFSCSVMHEALHNHYTQKSLSLSPG

SEQ ID NO: 676 - protein, 453 aa, artificial
  Synthetic polypeptide
ELQLQESGPGLVKPSETLSLTCTVSGGSISTSSYHWGWIRQPPGKGLEWIGSIYYTGNTYYMPSLKSRVTISVDTSKNQFSLKLSSVTAADTAVYYCVRVRYGVGVPRYFDPWGQGTLVTVSSASTKGPSVFPLAPSSKSTSGGTAALGCLVKDYFPEPVTVSWNSGALTSGVHTFPAVLQSSGLYSLSSVVTVPSSSLGTQTYICNVNHKPSNTKVDKKVEPKSCDKTHTCPPCPAPELLGGPSVFLFPPKPKDTYITRETPEVTCVVVDVSHEDPEVKFNWYVDGVEVHNAKTKPREEQYGSTYRVVSVLTVLHQDWLNGKEYKCKVSNKALPAPIEKTISKAKGQPREPQVYTLPPSRDELTKNQVSLWCLVKGFYPSDIAVEWESNGQPENNYKTTPPVLDSDGSFFLYSKLTVDKSRWQQGNVFSCSVMHEALHNHYTQKSLSLSPGK

SEQ ID NO: 677 - protein, 453 aa, artificial
  Synthetic polypeptide
ELQLQESGPGLVKPSETLSLTCTVSGGSISTSSYHWGWIRQPPGKGLEWIGSIYYTGNTYYMPSLKSRVTISVDTSKNQFSLKLSSVTAADTAVYYCVRVRYGVGVPRYFDPWGQGTLVTVSSASTKGPSVFPLAPSSKSTSGGTAALGCLVKDYFPEPVTVSWNSGALTSGVHTFPAVLQSSGLYSLSSVVTVPSSSLGTQTYICNVNHKPSNTKVDKKVEPKSCDKTHTCPPCPAPELLGGPSVFLFPPKPKDTLMISRTPEVTCVVVDVSHEDPEVKFNWYVDGVEVHNAKTKPREEQYGSTYRVVSVLTVLHQDWLNGKEYKCKVSNKALPAPIEKTISKAKGQPREPQVYTLPPSRDELTKNQVSLSCAVKGFYPSDIAVEWESNGQPENNYKTTPPVLDSDGSFFLVSKLTVDKSRWQQGNVFSCSVMHEALHNHYTQKSLSLSPGK

SEQ ID NO: 678 - protein, 452 aa, artificial
  Synthetic polypeptide
ELQLQESGPGLVKPSETLSLTCTVSGGSISTSSYHWGWIRQPPGKGLEWIGSIYYTGNTYYMPSLKSRVTISVDTSKNQFSLKLSSVTAADTAVYYCVRVRYGVGVPRYFDPWGQGTLVTVSSASTKGPSVFPLAPSSKSTSGGTAALGCLVKDYFPEPVTVSWNSGALTSGVHTFPAVLQSSGLYSLSSVVTVPSSSLGTQTYICNVNHKPSNTKVDKKVEPKSCDKTHTCPPCPAPELLGGPSVFLFPPKPKDTYITRETPEVTCVVVDVSHEDPEVKFNWYVDGVEVHNAKTKPREEQYGSTYRVVSVLTVLHQDWLNGKEYKCKVSNKALPAPIEKTISKAKGQPREPQVYTLPPSRDELTKNQVSLSCAVKGFYPSDIAVEWESNGQPENNYKTTPPVLDSDGSFFLVSKLTVDKSRWQQGNVFSCSVMHEALHNHYTQKSLSLSPG

SEQ ID NO: 679 - protein, 453 aa, artificial
  Synthetic polypeptide
ELQLQESGPGLVKPSETLSLTCTVSGGSISTSSYHWGWIRQPPGKGLEWIGSIYYTGNTYYMPSLKSRVTISVDTSKNQFSLKLSSVTAADTAVYYCVRVRYGVGVPRYFDPWGQGTLVTVSSASTKGPSVFPLAPSSKSTSGGTAALGCLVKDYFPEPVTVSWNSGALTSGVHTFPAVLQSSGLYSLSSVVTVPSSSLGTQTYICNVNHKPSNTKVDKKVEPKSCDKTHTCPPCPAPELLGGPSVFLFPPKPKDTYITRETPEVTCVVVDVSHEDPEVKFNWYVDGVEVHNAKTKPREEQYGSTYRVVSVLTVLHQDWLNGKEYKCKVSNKALPAPIEKTISKAKGQPREPQVYTLPPSRDELTKNQVSLSCAVKGFYPSDIAVEWESNGQPENNYKTTPPVLDSDGSFFLVSKLTVDKSRWQQGNVFSCSVMHEALHNHYTQKSLSLSPGK

SEQ ID NO: 680 - protein, 453 aa, artificial
  Synthetic polypeptide
ELQLQESGPGLVKPSETLSLTCTVSGGSISRSSYYWGWIRQPPGKGLEWIGSIYYTGNTYYWPSLKSRVTISVDTSKNQFSLKLSSVTAADTAVYYCTRVRYGVGVPRYFDPWGQGTLVTVSSASTKGPSVFPLAPSSKSTSGGTAALGCLVKDYFPEPVTVSWNSGALTSGVHTFPAVLQSSGLYSLSSVVTVPSSSLGTQTYICNVNHKPSNTKVDKKVEPKSCDKTHTCPPCPAPELLGGPSVFLFPPKPKDTLMISRTPEVTCVVVDVSHEDPEVKFNWYVDGVEVHNAKTKPREEQYGSTYRVVSVLTVLHQDWLNGKEYKCKVSNKALPAPIEKTISKAKGQPREPQVYTLPPSRDELTKNQVSLTCLVKGFYPSDIAVEWESNGQPENNYKTTPPVLDSDGSFFLYSKLTVDKSRWQQGNVFSCSVMHEALHNHYTQKSLSLSPGK

SEQ ID NO: 681 - protein, 452 aa, artificial
  Synthetic polypeptide
ELQLQESGPGLVKPSETLSLTCTVSGGSISRSSYYWGWIRQPPGKGLEWIGSIYYTGNTYYWPSLKSRVTISVDTSKNQFSLKLSSVTAADTAVYYCTRVRYGVGVPRYFDPWGQGTLVTVSSASTKGPSVFPLAPSSKSTSGGTAALGCLVKDYFPEPVTVSWNSGALTSGVHTFPAVLQSSGLYSLSSVVTVPSSSLGTQTYICNVNHKPSNTKVDKKVEPKSCDKTHTCPPCPAPELLGGPSVFLFPPKPKDTYITRETPEVTCVVVDVSHEDPEVKFNWYVDGVEVHNAKTKPREEQYGSTYRVVSVLTVLHQDWLNGKEYKCKVSNKALPAPIEKTISKAKGQPREPQVYTLPPSRDELTKNQVSLTCLVKGFYPSDIAVEWESNGQPENNYKTTPPVLDSDGSFFLYSKLTVDKSRWQQGNVFSCSVMHEALHNHYTQKSLSLSPG

SEQ ID NO: 682 - protein, 453 aa, artificial
  Synthetic polypeptide
ELQLQESGPGLVKPSETLSLTCTVSGGSISRSSYYWGWIRQPPGKGLEWIGSIYYTGNTYYWPSLKSRVTISVDTSKNQFSLKLSSVTAADTAVYYCTRVRYGVGVPRYFDPWGQGTLVTVSSASTKGPSVFPLAPSSKSTSGGTAALGCLVKDYFPEPVTVSWNSGALTSGVHTFPAVLQSSGLYSLSSVVTVPSSSLGTQTYICNVNHKPSNTKVDKKVEPKSCDKTHTCPPCPAPELLGGPSVFLFPPKPKDTYITRETPEVTCVVVDVSHEDPEVKFNWYVDGVEVHNAKTKPREEQYGSTYRVVSVLTVLHQDWLNGKEYKCKVSNKALPAPIEKTISKAKGQPREPQVYTLPPSRDELTKNQVSLTCLVKGFYPSDIAVEWESNGQPENNYKTTPPVLDSDGSFFLYSKLTVDKSRWQQGNVFSCSVMHEALHNHYTQKSLSLSPGK

SEQ ID NO: 683 - protein, 453 aa, artificial
  Synthetic polypeptide
ELQLQESGPGLVKPSETLSLTCTVSGGSISRSSYYWGWIRQPPGKGLEWIGSIYYTGNTYYWPSLKSRVTISVDTSKNQFSLKLSSVTAADTAVYYCTRVRYGVGVPRYFDPWGQGTLVTVSSASTKGPSVFPLAPSSKSTSGGTAALGCLVKDYFPEPVTVSWNSGALTSGVHTFPAVLQSSGLYSLSSVVTVPSSSLGTQTYICNVNHKPSNTKVDKKVEPKSCDKTHTCPPCPAPELLGGPSVFLFPPKPKDTLMISRTPEVTCVVVDVSHEDPEVKFNWYVDGVEVHNAKTKPREEQYGSTYRVVSVLTVLHQDWLNGKEYKCKVSNKALPAPIEKTISKAKGQPREPQVYTLPPSRDELTKNQVSLWCLVKGFYPSDIAVEWESNGQPENNYKTTPPVLDSDGSFFLYSKLTVDKSRWQQGNVFSCSVMHEALHNHYTQKSLSLSPGK

SEQ ID NO: 684 - protein, 452 aa, artificial
  Synthetic polypeptide
ELQLQESGPGLVKPSETLSLTCTVSGGSISRSSYYWGWIRQPPGKGLEWIGSIYYTGNTYYWPSLKSRVTISVDTSKNQFSLKLSSVTAADTAVYYCTRVRYGVGVPRYFDPWGQGTLVTVSSASTKGPSVFPLAPSSKSTSGGTAALGCLVKDYFPEPVTVSWNSGALTSGVHTFPAVLQSSGLYSLSSVVTVPSSSLGTQTYICNVNHKPSNTKVDKKVEPKSCDKTHTCPPCPAPELLGGPSVFLFPPKPKDTYITRETPEVTCVVVDVSHEDPEVKFNWYVDGVEVHNAKTKPREEQYGSTYRVVSVLTVLHQDWLNGKEYKCKVSNKALPAPIEKTISKAKGQPREPQVYTLPPSRDELTKNQVSLWCLVKGFYPSDIAVEWESNGQPENNYKTTPPVLDSDGSFFLYSKLTVDKSRWQQGNVFSCSVMHEALHNHYTQKSLSLSPG

SEQ ID NO: 685 - protein, 453 aa, artificial
  Synthetic polypeptide
ELQLQESGPGLVKPSETLSLTCTVSGGSISRSSYYWGWIRQPPGKGLEWIGSIYYTGNTYYWPSLKSRVTISVDTSKNQFSLKLSSVTAADTAVYYCTRVRYGVGVPRYFDPWGQGTLVTVSSASTKGPSVFPLAPSSKSTSGGTAALGCLVKDYFPEPVTVSWNSGALTSGVHTFPAVLQSSGLYSLSSVVTVPSSSLGTQTYICNVNHKPSNTKVDKKVEPKSCDKTHTCPPCPAPELLGGPSVFLFPPKPKDTYITRETPEVTCVVVDVSHEDPEVKFNWYVDGVEVHNAKTKPREEQYGSTYRVVSVLTVLHQDWLNGKEYKCKVSNKALPAPIEKTISKAKGQPREPQVYTLPPSRDELTKNQVSLWCLVKGFYPSDIAVEWESNGQPENNYKTTPPVLDSDGSFFLYSKLTVDKSRWQQGNVFSCSVMHEALHNHYTQKSLSLSPGK

SEQ ID NO: 686 - protein, 453 aa, artificial
  Synthetic polypeptide
ELQLQESGPGLVKPSETLSLTCTVSGGSISRSSYYWGWIRQPPGKGLEWIGSIYYTGNTYYWPSLKSRVTISVDTSKNQFSLKLSSVTAADTAVYYCTRVRYGVGVPRYFDPWGQGTLVTVSSASTKGPSVFPLAPSSKSTSGGTAALGCLVKDYFPEPVTVSWNSGALTSGVHTFPAVLQSSGLYSLSSVVTVPSSSLGTQTYICNVNHKPSNTKVDKKVEPKSCDKTHTCPPCPAPELLGGPSVFLFPPKPKDTLMISRTPEVTCVVVDVSHEDPEVKFNWYVDGVEVHNAKTKPREEQYGSTYRVVSVLTVLHQDWLNGKEYKCKVSNKALPAPIEKTISKAKGQPREPQVYTLPPSRDELTKNQVSLSCAVKGFYPSDIAVEWESNGQPENNYKTTPPVLDSDGSFFLVSKLTVDKSRWQQGNVFSCSVMHEALHNHYTQKSLSLSPGK

SEQ ID NO: 687 - protein, 452 aa, artificial
  Synthetic polypeptide
ELQLQESGPGLVKPSETLSLTCTVSGGSISRSSYYWGWIRQPPGKGLEWIGSIYYTGNTYYWPSLKSRVTISVDTSKNQFSLKLSSVTAADTAVYYCTRVRYGVGVPRYFDPWGQGTLVTVSSASTKGPSVFPLAPSSKSTSGGTAALGCLVKDYFPEPVTVSWNSGALTSGVHTFPAVLQSSGLYSLSSVVTVPSSSLGTQTYICNVNHKPSNTKVDKKVEPKSCDKTHTCPPCPAPELLGGPSVFLFPPKPKDTYITRETPEVTCVVVDVSHEDPEVKFNWYVDGVEVHNAKTKPREEQYGSTYRVVSVLTVLHQDWLNGKEYKCKVSNKALPAPIEKTISKAKGQPREPQVYTLPPSRDELTKNQVSLSCAVKGFYPSDIAVEWESNGQPENNYKTTPPVLDSDGSFFLVSKLTVDKSRWQQGNVFSCSVMHEALHNHYTQKSLSLSPG

SEQ ID NO: 688 - protein, 453 aa, artificial
  Synthetic polypeptide
ELQLQESGPGLVKPSETLSLTCTVSGGSISRSSYYWGWIRQPPGKGLEWIGSIYYTGNTYYWPSLKSRVTISVDTSKNQFSLKLSSVTAADTAVYYCTRVRYGVGVPRYFDPWGQGTLVTVSSASTKGPSVFPLAPSSKSTSGGTAALGCLVKDYFPEPVTVSWNSGALTSGVHTFPAVLQSSGLYSLSSVVTVPSSSLGTQTYICNVNHKPSNTKVDKKVEPKSCDKTHTCPPCPAPELLGGPSVFLFPPKPKDTYITRETPEVTCVVVDVSHEDPEVKFNWYVDGVEVHNAKTKPREEQYGSTYRVVSVLTVLHQDWLNGKEYKCKVSNKALPAPIEKTISKAKGQPREPQVYTLPPSRDELTKNQVSLSCAVKGFYPSDIAVEWESNGQPENNYKTTPPVLDSDGSFFLVSKLTVDKSRWQQGNVFSCSVMHEALHNHYTQKSLSLSPGK

SEQ ID NO: 689 - protein, 453 aa, artificial
  Synthetic polypeptide
ELQLQESGPGLVKPSETLSLTCTVSGGSISDSSYYWGWIRQPPGKGLEWIGSIYYTGETYYAPSLKSRVTISVDTSKNQFSLKLSSVTAADTAVYYCARLRYGVGVPRYFDPWGQGTLVTVSSASTKGPSVFPLAPSSKSTSGGTAALGCLVKDYFPEPVTVSWNSGALTSGVHTFPAVLQSSGLYSLSSVVTVPSSSLGTQTYICNVNHKPSNTKVDKKVEPKSCDKTHTCPPCPAPELLGGPSVFLFPPKPKDTLMISRTPEVTCVVVDVSHEDPEVKFNWYVDGVEVHNAKTKPREEQYGSTYRVVSVLTVLHQDWLNGKEYKCKVSNKALPAPIEKTISKAKGQPREPQVYTLPPSRDELTKNQVSLTCLVKGFYPSDIAVEWESNGQPENNYKTTPPVLDSDGSFFLYSKLTVDKSRWQQGNVFSCSVMHEALHNHYTQKSLSLSPGK

SEQ ID NO: 690 - protein, 452 aa, artificial
  Synthetic polypeptide
ELQLQESGPGLVKPSETLSLTCTVSGGSISDSSYYWGWIRQPPGKGLEWIGSIYYTGETYYAPSLKSRVTISVDTSKNQFSLKLSSVTAADTAVYYCARLRYGVGVPRYFDPWGQGTLVTVSSASTKGPSVFPLAPSSKSTSGGTAALGCLVKDYFPEPVTVSWNSGALTSGVHTFPAVLQSSGLYSLSSVVTVPSSSLGTQTYICNVNHKPSNTKVDKKVEPKSCDKTHTCPPCPAPELLGGPSVFLFPPKPKDTYITRETPEVTCVVVDVSHEDPEVKFNWYVDGVEVHNAKTKPREEQYGSTYRVVSVLTVLHQDWLNGKEYKCKVSNKALPAPIEKTISKAKGQPREPQVYTLPPSRDELTKNQVSLTCLVKGFYPSDIAVEWESNGQPENNYKTTPPVLDSDGSFFLYSKLTVDKSRWQQGNVFSCSVMHEALHNHYTQKSLSLSPG

SEQ ID NO: 691 - protein, 453 aa, artificial
  Synthetic polypeptide
ELQLQESGPGLVKPSETLSLTCTVSGGSISDSSYYWGWIRQPPGKGLEWIGSIYYTGETYYAPSLKSRVTISVDTSKNQFSLKLSSVTAADTAVYYCARLRYGVGVPRYFDPWGQGTLVTVSSASTKGPSVFPLAPSSKSTSGGTAALGCLVKDYFPEPVTVSWNSGALTSGVHTFPAVLQSSGLYSLSSVVTVPSSSLGTQTYICNVNHKPSNTKVDKKVEPKSCDKTHTCPPCPAPELLGGPSVFLFPPKPKDTYITRETPEVTCVVVDVSHEDPEVKFNWYVDGVEVHNAKTKPREEQYGSTYRVVSVLTVLHQDWLNGKEYKCKVSNKALPAPIEKTISKAKGQPREPQVYTLPPSRDELTKNQVSLTCLVKGFYPSDIAVEWESNGQPENNYKTTPPVLDSDGSFFLYSKLTVDKSRWQQGNVFSCSVMHEALHNHYTQKSLSLSPGK

SEQ ID NO: 692 - protein, 453 aa, artificial
  Synthetic polypeptide
ELQLQESGPGLVKPSETLSLTCTVSGGSISDSSYYWGWIRQPPGKGLEWIGSIYYTGETYYAPSLKSRVTISVDTSKNQFSLKLSSVTAADTAVYYCARLRYGVGVPRYFDPWGQGTLVTVSSASTKGPSVFPLAPSSKSTSGGTAALGCLVKDYFPEPVTVSWNSGALTSGVHTFPAVLQSSGLYSLSSVVTVPSSSLGTQTYICNVNHKPSNTKVDKKVEPKSCDKTHTCPPCPAPELLGGPSVFLFPPKPKDTLMISRTPEVTCVVVDVSHEDPEVKFNWYVDGVEVHNAKTKPREEQYGSTYRVVSVLTVLHQDWLNGKEYKCKVSNKALPAPIEKTISKAKGQPREPQVYTLPPSRDELTKNQVSLWCLVKGFYPSDIAVEWESNGQPENNYKTTPPVLDSDGSFFLYSKLTVDKSRWQQGNVFSCSVMHEALHNHYTQKSLSLSPGK

SEQ ID NO: 693 - protein, 452 aa, artificial
  Synthetic polypeptide
ELQLQESGPGLVKPSETLSLTCTVSGGSISDSSYYWGWIRQPPGKGLEWIGSIYYTGETYYAPSLKSRVTISVDTSKNQFSLKLSSVTAADTAVYYCARLRYGVGVPRYFDPWGQGTLVTVSSASTKGPSVFPLAPSSKSTSGGTAALGCLVKDYFPEPVTVSWNSGALTSGVHTFPAVLQSSGLYSLSSVVTVPSSSLGTQTYICNVNHKPSNTKVDKKVEPKSCDKTHTCPPCPAPELLGGPSVFLFPPKPKDTYITRETPEVTCVVVDVSHEDPEVKFNWYVDGVEVHNAKTKPREEQYGSTYRVVSVLTVLHQDWLNGKEYKCKVSNKALPAPIEKTISKAKGQPREPQVYTLPPSRDELTKNQVSLWCLVKGFYPSDIAVEWESNGQPENNYKTTPPVLDSDGSFFLYSKLTVDKSRWQQGNVFSCSVMHEALHNHYTQKSLSLSPG

SEQ ID NO: 694 - protein, 453 aa, artificial
  Synthetic polypeptide
ELQLQESGPGLVKPSETLSLTCTVSGGSISDSSYYWGWIRQPPGKGLEWIGSIYYTGETYYAPSLKSRVTISVDTSKNQFSLKLSSVTAADTAVYYCARLRYGVGVPRYFDPWGQGTLVTVSSASTKGPSVFPLAPSSKSTSGGTAALGCLVKDYFPEPVTVSWNSGALTSGVHTFPAVLQSSGLYSLSSVVTVPSSSLGTQTYICNVNHKPSNTKVDKKVEPKSCDKTHTCPPCPAPELLGGPSVFLFPPKPKDTYITRETPEVTCVVVDVSHEDPEVKFNWYVDGVEVHNAKTKPREEQYGSTYRVVSVLTVLHQDWLNGKEYKCKVSNKALPAPIEKTISKAKGQPREPQVYTLPPSRDELTKNQVSLWCLVKGFYPSDIAVEWESNGQPENNYKTTPPVLDSDGSFFLYSKLTVDKSRWQQGNVFSCSVMHEALHNHYTQKSLSLSPGK

SEQ ID NO: 695 - protein, 453 aa, artificial
  Synthetic polypeptide
ELQLQESGPGLVKPSETLSLTCTVSGGSISDSSYYWGWIRQPPGKGLEWIGSIYYTGETYYAPSLKSRVTISVDTSKNQFSLKLSSVTAADTAVYYCARLRYGVGVPRYFDPWGQGTLVTVSSASTKGPSVFPLAPSSKSTSGGTAALGCLVKDYFPEPVTVSWNSGALTSGVHTFPAVLQSSGLYSLSSVVTVPSSSLGTQTYICNVNHKPSNTKVDKKVEPKSCDKTHTCPPCPAPELLGGPSVFLFPPKPKDTLMISRTPEVTCVVVDVSHEDPEVKFNWYVDGVEVHNAKTKPREEQYGSTYRVVSVLTVLHQDWLNGKEYKCKVSNKALPAPIEKTISKAKGQPREPQVYTLPPSRDELTKNQVSLSCAVKGFYPSDIAVEWESNGQPENNYKTTPPVLDSDGSFFLVSKLTVDKSRWQQGNVFSCSVMHEALHNHYTQKSLSLSPGK

SEQ ID NO: 696 - protein, 452 aa, artificial
  Synthetic polypeptide
ELQLQESGPGLVKPSETLSLTCTVSGGSISDSSYYWGWIRQPPGKGLEWIGSIYYTGETYYAPSLKSRVTISVDTSKNQFSLKLSSVTAADTAVYYCARLRYGVGVPRYFDPWGQGTLVTVSSASTKGPSVFPLAPSSKSTSGGTAALGCLVKDYFPEPVTVSWNSGALTSGVHTFPAVLQSSGLYSLSSVVTVPSSSLGTQTYICNVNHKPSNTKVDKKVEPKSCDKTHTCPPCPAPELLGGPSVFLFPPKPKDTYITRETPEVTCVVVDVSHEDPEVKFNWYVDGVEVHNAKTKPREEQYGSTYRVVSVLTVLHQDWLNGKEYKCKVSNKALPAPIEKTISKAKGQPREPQVYTLPPSRDELTKNQVSLSCAVKGFYPSDIAVEWESNGQPENNYKTTPPVLDSDGSFFLVSKLTVDKSRWQQGNVFSCSVMHEALHNHYTQKSLSLSPG

SEQ ID NO: 697 - protein, 453 aa, artificial
  Synthetic polypeptide
ELQLQESGPGLVKPSETLSLTCTVSGGSISDSSYYWGWIRQPPGKGLEWIGSIYYTGETYYAPSLKSRVTISVDTSKNQFSLKLSSVTAADTAVYYCARLRYGVGVPRYFDPWGQGTLVTVSSASTKGPSVFPLAPSSKSTSGGTAALGCLVKDYFPEPVTVSWNSGALTSGVHTFPAVLQSSGLYSLSSVVTVPSSSLGTQTYICNVNHKPSNTKVDKKVEPKSCDKTHTCPPCPAPELLGGPSVFLFPPKPKDTYITRETPEVTCVVVDVSHEDPEVKFNWYVDGVEVHNAKTKPREEQYGSTYRVVSVLTVLHQDWLNGKEYKCKVSNKALPAPIEKTISKAKGQPREPQVYTLPPSRDELTKNQVSLSCAVKGFYPSDIAVEWESNGQPENNYKTTPPVLDSDGSFFLVSKLTVDKSRWQQGNVFSCSVMHEALHNHYTQKSLSLSPGK

SEQ ID NO: 698 - protein, 453 aa, artificial
  Synthetic polypeptide
ELQLQESGPGLVKPSETLSLTCTVSGGSISDSSYYWGWIRQPPGKGLEWIGSIYYTGETYYAPSLKSRVTISVDTSKNQFSLKLSSVTAADTAVYYCARVKYGVGVPRYFDPWGQGTLVTVSSASTKGPSVFPLAPSSKSTSGGTAALGCLVKDYFPEPVTVSWNSGALTSGVHTFPAVLQSSGLYSLSSVVTVPSSSLGTQTYICNVNHKPSNTKVDKKVEPKSCDKTHTCPPCPAPELLGGPSVFLFPPKPKDTLMISRTPEVTCVVVDVSHEDPEVKFNWYVDGVEVHNAKTKPREEQYGSTYRVVSVLTVLHQDWLNGKEYKCKVSNKALPAPIEKTISKAKGQPREPQVYTLPPSRDELTKNQVSLTCLVKGFYPSDIAVEWESNGQPENNYKTTPPVLDSDGSFFLYSKLTVDKSRWQQGNVFSCSVMHEALHNHYTQKSLSLSPGK

SEQ ID NO: 699 - protein, 452 aa, artificial
  Synthetic polypeptide
ELQLQESGPGLVKPSETLSLTCTVSGGSISDSSYYWGWIRQPPGKGLEWIGSIYYTGETYYAPSLKSRVTISVDTSKNQFSLKLSSVTAADTAVYYCARVKYGVGVPRYFDPWGQGTLVTVSSASTKGPSVFPLAPSSKSTSGGTAALGCLVKDYFPEPVTVSWNSGALTSGVHTFPAVLQSSGLYSLSSVVTVPSSSLGTQTYICNVNHKPSNTKVDKKVEPKSCDKTHTCPPCPAPELLGGPSVFLFPPKPKDTYITRETPEVTCVVVDVSHEDPEVKFNWYVDGVEVHNAKTKPREEQYGSTYRVVSVLTVLHQDWLNGKEYKCKVSNKALPAPIEKTISKAKGQPREPQVYTLPPSRDELTKNQVSLTCLVKGFYPSDIAVEWESNGQPENNYKTTPPVLDSDGSFFLYSKLTVDKSRWQQGNVFSCSVMHEALHNHYTQKSLSLSPG

SEQ ID NO: 700 - protein, 453 aa, artificial
  Synthetic polypeptide
ELQLQESGPGLVKPSETLSLTCTVSGGSISDSSYYWGWIRQPPGKGLEWIGSIYYTGETYYAPSLKSRVTISVDTSKNQFSLKLSSVTAADTAVYYCARVKYGVGVPRYFDPWGQGTLVTVSSASTKGPSVFPLAPSSKSTSGGTAALGCLVKDYFPEPVTVSWNSGALTSGVHTFPAVLQSSGLYSLSSVVTVPSSSLGTQTYICNVNHKPSNTKVDKKVEPKSCDKTHTCPPCPAPELLGGPSVFLFPPKPKDTYITRETPEVTCVVVDVSHEDPEVKFNWYVDGVEVHNAKTKPREEQYGSTYRVVSVLTVLHQDWLNGKEYKCKVSNKALPAPIEKTISKAKGQPREPQVYTLPPSRDELTKNQVSLTCLVKGFYPSDIAVEWESNGQPENNYKTTPPVLDSDGSFFLYSKLTVDKSRWQQGNVFSCSVMHEALHNHYTQKSLSLSPGK

SEQ ID NO: 701 - protein, 453 aa, artificial
  Synthetic polypeptide
ELQLQESGPGLVKPSETLSLTCTVSGGSISDSSYYWGWIRQPPGKGLEWIGSIYYTGETYYAPSLKSRVTISVDTSKNQFSLKLSSVTAADTAVYYCARVKYGVGVPRYFDPWGQGTLVTVSSASTKGPSVFPLAPSSKSTSGGTAALGCLVKDYFPEPVTVSWNSGALTSGVHTFPAVLQSSGLYSLSSVVTVPSSSLGTQTYICNVNHKPSNTKVDKKVEPKSCDKTHTCPPCPAPELLGGPSVFLFPPKPKDTLMISRTPEVTCVVVDVSHEDPEVKFNWYVDGVEVHNAKTKPREEQYGSTYRVVSVLTVLHQDWLNGKEYKCKVSNKALPAPIEKTISKAKGQPREPQVYTLPPSRDELTKNQVSLWCLVKGFYPSDIAVEWESNGQPENNYKTTPPVLDSDGSFFLYSKLTVDKSRWQQGNVFSCSVMHEALHNHYTQKSLSLSPGK

SEQ ID NO: 702 - protein, 452 aa, artificial
  Synthetic polypeptide
ELQLQESGPGLVKPSETLSLTCTVSGGSISDSSYYWGWIRQPPGKGLEWIGSIYYTGETYYAPSLKSRVTISVDTSKNQFSLKLSSVTAADTAVYYCARVKYGVGVPRYFDPWGQGTLVTVSSASTKGPSVFPLAPSSKSTSGGTAALGCLVKDYFPEPVTVSWNSGALTSGVHTFPAVLQSSGLYSLSSVVTVPSSSLGTQTYICNVNHKPSNTKVDKKVEPKSCDKTHTCPPCPAPELLGGPSVFLFPPKPKDTYITRETPEVTCVVVDVSHEDPEVKFNWYVDGVEVHNAKTKPREEQYGSTYRVVSVLTVLHQDWLNGKEYKCKVSNKALPAPIEKTISKAKGQPREPQVYTLPPSRDELTKNQVSLWCLVKGFYPSDIAVEWESNGQPENNYKTTPPVLDSDGSFFLYSKLTVDKSRWQQGNVFSCSVMHEALHNHYTQKSLSLSPG

SEQ ID NO: 703 - protein, 453 aa, artificial
  Synthetic polypeptide
ELQLQESGPGLVKPSETLSLTCTVSGGSISDSSYYWGWIRQPPGKGLEWIGSIYYTGETYYAPSLKSRVTISVDTSKNQFSLKLSSVTAADTAVYYCARVKYGVGVPRYFDPWGQGTLVTVSSASTKGPSVFPLAPSSKSTSGGTAALGCLVKDYFPEPVTVSWNSGALTSGVHTFPAVLQSSGLYSLSSVVTVPSSSLGTQTYICNVNHKPSNTKVDKKVEPKSCDKTHTCPPCPAPELLGGPSVFLFPPKPKDTYITRETPEVTCVVVDVSHEDPEVKFNWYVDGVEVHNAKTKPREEQYGSTYRVVSVLTVLHQDWLNGKEYKCKVSNKALPAPIEKTISKAKGQPREPQVYTLPPSRDELTKNQVSLWCLVKGFYPSDIAVEWESNGQPENNYKTTPPVLDSDGSFFLYSKLTVDKSRWQQGNVFSCSVMHEALHNHYTQKSLSLSPGK

SEQ ID NO: 704 - protein, 453 aa, artificial
  Synthetic polypeptide
ELQLQESGPGLVKPSETLSLTCTVSGGSISDSSYYWGWIRQPPGKGLEWIGSIYYTGETYYAPSLKSRVTISVDTSKNQFSLKLSSVTAADTAVYYCARVKYGVGVPRYFDPWGQGTLVTVSSASTKGPSVFPLAPSSKSTSGGTAALGCLVKDYFPEPVTVSWNSGALTSGVHTFPAVLQSSGLYSLSSVVTVPSSSLGTQTYICNVNHKPSNTKVDKKVEPKSCDKTHTCPPCPAPELLGGPSVFLFPPKPKDTLMISRTPEVTCVVVDVSHEDPEVKFNWYVDGVEVHNAKTKPREEQYGSTYRVVSVLTVLHQDWLNGKEYKCKVSNKALPAPIEKTISKAKGQPREPQVYTLPPSRDELTKNQVSLSCAVKGFYPSDIAVEWESNGQPENNYKTTPPVLDSDGSFFLVSKLTVDKSRWQQGNVFSCSVMHEALHNHYTQKSLSLSPGK

SEQ ID NO: 705 - protein, 452 aa, artificial
  Synthetic polypeptide
ELQLQESGPGLVKPSETLSLTCTVSGGSISDSSYYWGWIRQPPGKGLEWIGSIYYTGETYYAPSLKSRVTISVDTSKNQFSLKLSSVTAADTAVYYCARVKYGVGVPRYFDPWGQGTLVTVSSASTKGPSVFPLAPSSKSTSGGTAALGCLVKDYFPEPVTVSWNSGALTSGVHTFPAVLQSSGLYSLSSVVTVPSSSLGTQTYICNVNHKPSNTKVDKKVEPKSCDKTHTCPPCPAPELLGGPSVFLFPPKPKDTYITRETPEVTCVVVDVSHEDPEVKFNWYVDGVEVHNAKTKPREEQYGSTYRVVSVLTVLHQDWLNGKEYKCKVSNKALPAPIEKTISKAKGQPREPQVYTLPPSRDELTKNQVSLSCAVKGFYPSDIAVEWESNGQPENNYKTTPPVLDSDGSFFLVSKLTVDKSRWQQGNVFSCSVMHEALHNHYTQKSLSLSPG

SEQ ID NO: 706 - protein, 453 aa, artificial
  Synthetic polypeptide
ELQLQESGPGLVKPSETLSLTCTVSGGSISDSSYYWGWIRQPPGKGLEWIGSIYYTGETYYAPSLKSRVTISVDTSKNQFSLKLSSVTAADTAVYYCARVKYGVGVPRYFDPWGQGTLVTVSSASTKGPSVFPLAPSSKSTSGGTAALGCLVKDYFPEPVTVSWNSGALTSGVHTFPAVLQSSGLYSLSSVVTVPSSSLGTQTYICNVNHKPSNTKVDKKVEPKSCDKTHTCPPCPAPELLGGPSVFLFPPKPKDTYITRETPEVTCVVVDVSHEDPEVKFNWYVDGVEVHNAKTKPREEQYGSTYRVVSVLTVLHQDWLNGKEYKCKVSNKALPAPIEKTISKAKGQPREPQVYTLPPSRDELTKNQVSLSCAVKGFYPSDIAVEWESNGQPENNYKTTPPVLDSDGSFFLVSKLTVDKSRWQQGNVFSCSVMHEALHNHYTQKSLSLSPGK

SEQ ID NO: 707 - protein, 453 aa, artificial
  Synthetic polypeptide
ELQLQESGPGLVKPSETLSLTCTVSGGSISDSSYYWGWIRQPPGKGLEWIGSIYYTGETYYAPSLKSRVTISVDTSKNQFSLKLSSVTAADTAVYYCARVRYGVGVPRHFDPWGQGTLVTVSSASTKGPSVFPLAPSSKSTSGGTAALGCLVKDYFPEPVTVSWNSGALTSGVHTFPAVLQSSGLYSLSSVVTVPSSSLGTQTYICNVNHKPSNTKVDKKVEPKSCDKTHTCPPCPAPELLGGPSVFLFPPKPKDTLMISRTPEVTCVVVDVSHEDPEVKFNWYVDGVEVHNAKTKPREEQYGSTYRVVSVLTVLHQDWLNGKEYKCKVSNKALPAPIEKTISKAKGQPREPQVYTLPPSRDELTKNQVSLTCLVKGFYPSDIAVEWESNGQPENNYKTTPPVLDSDGSFFLYSKLTVDKSRWQQGNVFSCSVMHEALHNHYTQKSLSLSPGK

SEQ ID NO: 708 - protein, 452 aa, artificial
  Synthetic polypeptide
ELQLQESGPGLVKPSETLSLTCTVSGGSISDSSYYWGWIRQPPGKGLEWIGSIYYTGETYYAPSLKSRVTISVDTSKNQFSLKLSSVTAADTAVYYCARVRYGVGVPRHFDPWGQGTLVTVSSASTKGPSVFPLAPSSKSTSGGTAALGCLVKDYFPEPVTVSWNSGALTSGVHTFPAVLQSSGLYSLSSVVTVPSSSLGTQTYICNVNHKPSNTKVDKKVEPKSCDKTHTCPPCPAPELLGGPSVFLFPPKPKDTYITRETPEVTCVVVDVSHEDPEVKFNWYVDGVEVHNAKTKPREEQYGSTYRVVSVLTVLHQDWLNGKEYKCKVSNKALPAPIEKTISKAKGQPREPQVYTLPPSRDELTKNQVSLTCLVKGFYPSDIAVEWESNGQPENNYKTTPPVLDSDGSFFLYSKLTVDKSRWQQGNVFSCSVMHEALHNHYTQKSLSLSPG

SEQ ID NO: 709 - protein, 453 aa, artificial
  Synthetic polypeptide
ELQLQESGPGLVKPSETLSLTCTVSGGSISDSSYYWGWIRQPPGKGLEWIGSIYYTGETYYAPSLKSRVTISVDTSKNQFSLKLSSVTAADTAVYYCARVRYGVGVPRHFDPWGQGTLVTVSSASTKGPSVFPLAPSSKSTSGGTAALGCLVKDYFPEPVTVSWNSGALTSGVHTFPAVLQSSGLYSLSSVVTVPSSSLGTQTYICNVNHKPSNTKVDKKVEPKSCDKTHTCPPCPAPELLGGPSVFLFPPKPKDTYITRETPEVTCVVVDVSHEDPEVKFNWYVDGVEVHNAKTKPREEQYGSTYRVVSVLTVLHQDWLNGKEYKCKVSNKALPAPIEKTISKAKGQPREPQVYTLPPSRDELTKNQVSLTCLVKGFYPSDIAVEWESNGQPENNYKTTPPVLDSDGSFFLYSKLTVDKSRWQQGNVFSCSVMHEALHNHYTQKSLSLSPGK

SEQ ID NO: 710 - protein, 453 aa, artificial
  Synthetic polypeptide
ELQLQESGPGLVKPSETLSLTCTVSGGSISDSSYYWGWIRQPPGKGLEWIGSIYYTGETYYAPSLKSRVTISVDTSKNQFSLKLSSVTAADTAVYYCARVRYGVGVPRHFDPWGQGTLVTVSSASTKGPSVFPLAPSSKSTSGGTAALGCLVKDYFPEPVTVSWNSGALTSGVHTFPAVLQSSGLYSLSSVVTVPSSSLGTQTYICNVNHKPSNTKVDKKVEPKSCDKTHTCPPCPAPELLGGPSVFLFPPKPKDTLMISRTPEVTCVVVDVSHEDPEVKFNWYVDGVEVHNAKTKPREEQYGSTYRVVSVLTVLHQDWLNGKEYKCKVSNKALPAPIEKTISKAKGQPREPQVYTLPPSRDELTKNQVSLWCLVKGFYPSDIAVEWESNGQPENNYKTTPPVLDSDGSFFLYSKLTVDKSRWQQGNVFSCSVMHEALHNHYTQKSLSLSPGK

SEQ ID NO: 711 - protein, 452 aa, artificial
  Synthetic polypeptide
ELQLQESGPGLVKPSETLSLTCTVSGGSISDSSYYWGWIRQPPGKGLEWIGSIYYTGETYYAPSLKSRVTISVDTSKNQFSLKLSSVTAADTAVYYCARVRYGVGVPRHFDPWGQGTLVTVSSASTKGPSVFPLAPSSKSTSGGTAALGCLVKDYFPEPVTVSWNSGALTSGVHTFPAVLQSSGLYSLSSVVTVPSSSLGTQTYICNVNHKPSNTKVDKKVEPKSCDKTHTCPPCPAPELLGGPSVFLFPPKPKDTYITRETPEVTCVVVDVSHEDPEVKFNWYVDGVEVHNAKTKPREEQYGSTYRVVSVLTVLHQDWLNGKEYKCKVSNKALPAPIEKTISKAKGQPREPQVYTLPPSRDELTKNQVSLWCLVKGFYPSDIAVEWESNGQPENNYKTTPPVLDSDGSFFLYSKLTVDKSRWQQGNVFSCSVMHEALHNHYTQKSLSLSPG

SEQ ID NO: 712 - protein, 453 aa, artificial
  Synthetic polypeptide
ELQLQESGPGLVKPSETLSLTCTVSGGSISDSSYYWGWIRQPPGKGLEWIGSIYYTGETYYAPSLKSRVTISVDTSKNQFSLKLSSVTAADTAVYYCARVRYGVGVPRHFDPWGQGTLVTVSSASTKGPSVFPLAPSSKSTSGGTAALGCLVKDYFPEPVTVSWNSGALTSGVHTFPAVLQSSGLYSLSSVVTVPSSSLGTQTYICNVNHKPSNTKVDKKVEPKSCDKTHTCPPCPAPELLGGPSVFLFPPKPKDTYITRETPEVTCVVVDVSHEDPEVKFNWYVDGVEVHNAKTKPREEQYGSTYRVVSVLTVLHQDWLNGKEYKCKVSNKALPAPIEKTISKAKGQPREPQVYTLPPSRDELTKNQVSLWCLVKGFYPSDIAVEWESNGQPENNYKTTPPVLDSDGSFFLYSKLTVDKSRWQQGNVFSCSVMHEALHNHYTQKSLSLSPGK

SEQ ID NO: 713 - protein, 453 aa, artificial
  Synthetic polypeptide
ELQLQESGPGLVKPSETLSLTCTVSGGSISDSSYYWGWIRQPPGKGLEWIGSIYYTGETYYAPSLKSRVTISVDTSKNQFSLKLSSVTAADTAVYYCARVRYGVGVPRHFDPWGQGTLVTVSSASTKGPSVFPLAPSSKSTSGGTAALGCLVKDYFPEPVTVSWNSGALTSGVHTFPAVLQSSGLYSLSSVVTVPSSSLGTQTYICNVNHKPSNTKVDKKVEPKSCDKTHTCPPCPAPELLGGPSVFLFPPKPKDTLMISRTPEVTCVVVDVSHEDPEVKFNWYVDGVEVHNAKTKPREEQYGSTYRVVSVLTVLHQDWLNGKEYKCKVSNKALPAPIEKTISKAKGQPREPQVYTLPPSRDELTKNQVSLSCAVKGFYPSDIAVEWESNGQPENNYKTTPPVLDSDGSFFLVSKLTVDKSRWQQGNVFSCSVMHEALHNHYTQKSLSLSPGK

SEQ ID NO: 714 - protein, 452 aa, artificial
  Synthetic polypeptide
ELQLQESGPGLVKPSETLSLTCTVSGGSISDSSYYWGWIRQPPGKGLEWIGSIYYTGETYYAPSLKSRVTISVDTSKNQFSLKLSSVTAADTAVYYCARVRYGVGVPRHFDPWGQGTLVTVSSASTKGPSVFPLAPSSKSTSGGTAALGCLVKDYFPEPVTVSWNSGALTSGVHTFPAVLQSSGLYSLSSVVTVPSSSLGTQTYICNVNHKPSNTKVDKKVEPKSCDKTHTCPPCPAPELLGGPSVFLFPPKPKDTYITRETPEVTCVVVDVSHEDPEVKFNWYVDGVEVHNAKTKPREEQYGSTYRVVSVLTVLHQDWLNGKEYKCKVSNKALPAPIEKTISKAKGQPREPQVYTLPPSRDELTKNQVSLSCAVKGFYPSDIAVEWESNGQPENNYKTTPPVLDSDGSFFLVSKLTVDKSRWQQGNVFSCSVMHEALHNHYTQKSLSLSPG

SEQ ID NO: 715 - protein, 453 aa, artificial
  Synthetic polypeptide
ELQLQESGPGLVKPSETLSLTCTVSGGSISDSSYYWGWIRQPPGKGLEWIGSIYYTGETYYAPSLKSRVTISVDTSKNQFSLKLSSVTAADTAVYYCARVRYGVGVPRHFDPWGQGTLVTVSSASTKGPSVFPLAPSSKSTSGGTAALGCLVKDYFPEPVTVSWNSGALTSGVHTFPAVLQSSGLYSLSSVVTVPSSSLGTQTYICNVNHKPSNTKVDKKVEPKSCDKTHTCPPCPAPELLGGPSVFLFPPKPKDTLYITREPEVTCVVVDVSHEDPEVKFNWYVDGVEVHNAKTKPREEQYGSTYRVVSVLTVLHQDWLNGKEYKCKVSNKALPAPIEKTISKAKGQPREPQVYTLPPSRDELTKNQVSLSCAVKGFYPSDIAVEWESNGQPENNYKTTPPVLDSDGSFFLVSKLTVDKSRWQQGNVFSCSVMHEALHNHYTQKSLSLSPGK

SEQ ID NO: 716 - protein, 453 aa, artificial
  Synthetic polypeptide
ELQLQESGPGLVKPSETLSLTCTVSGGSISESSYYWGWIRQPPGKGLEWIGSIYYTGETYYAPSLKSRVTISVDTSKNQFSLKLSSVTAADTAVYYCARLRYGVGVPRYFDPWGQGTLVTVSSASTKGPSVFPLAPSSKSTSGGTAALGCLVKDYFPEPVTVSWNSGALTSGVHTFPAVLQSSGLYSLSSVVTVPSSSLGTQTYICNVNHKPSNTKVDKKVEPKSCDKTHTCPPCPAPELLGGPSVFLFPPKPKDTLMISRTPEVTCVVVDVSHEDPEVKFNWYVDGVEVHNAKTKPREEQYGSTYRVVSVLTVLHQDWLNGKEYKCKVSNKALPAPIEKTISKAKGQPREPQVYTLPPSRDELTKNQVSLTCLVKGFYPSDIAVEWESNGQPENNYKTTPPVLDSDGSFFLYSKLTVDKSRWQQGNVFSCSVMHEALHNHYTQKSLSLSPGK

SEQ ID NO: 717 - protein, 452 aa, artificial
  Synthetic polypeptide
ELQLQESGPGLVKPSETLSLTCTVSGGSISESSYYWGWIRQPPGKGLEWIGSIYYTGETYYAPSLKSRVTISVDTSKNQFSLKLSSVTAADTAVYYCARLRYGVGVPRYFDPWGQGTLVTVSSASTKGPSVFPLAPSSKSTSGGTAALGCLVKDYFPEPVTVSWNSGALTSGVHTFPAVLQSSGLYSLSSVVTVPSSSLGTQTYICNVNHKPSNTKVDKKVEPKSCDKTHTCPPCPAPELLGGPSVFLFPPKPKDTYITRETPEVTCVVVDVSHEDPEVKFNWYVDGVEVHNAKTKPREEQYGSTYRVVSVLTVLHQDWLNGKEYKCKVSNKALPAPIEKTISKAKGQPREPQVYTLPPSRDELTKNQVSLTCLVKGFYPSDIAVEWESNGQPENNYKTTPPVLDSDGSFFLYSKLTVDKSRWQQGNVFSCSVMHEALHNHYTQKSLSLSPG

SEQ ID NO: 718 - protein, 453 aa, artificial
  Synthetic polypeptide
ELQLQESGPGLVKPSETLSLTCTVSGGSISESSYYWGWIRQPPGKGLEWIGSIYYTGETYYAPSLKSRVTISVDTSKNQFSLKLSSVTAADTAVYYCARLRYGVGVPRYFDPWGQGTLVTVSSASTKGPSVFPLAPSSKSTSGGTAALGCLVKDYFPEPVTVSWNSGALTSGVHTFPAVLQSSGLYSLSSVVTVPSSSLGTQTYICNVNHKPSNTKVDKKVEPKSCDKTHTCPPCPAPELLGGPSVFLFPPKPKDTYITRETPEVTCVVVDVSHEDPEVKFNWYVDGVEVHNAKTKPREEQYGSTYRVVSVLTVLHQDWLNGKEYKCKVSNKALPAPIEKTISKAKGQPREPQVYTLPPSRDELTKNQVSLTCLVKGFYPSDIAVEWESNGQPENNYKTTPPVLDSDGSFFLYSKLTVDKSRWQQGNVFSCSVMHEALHNHYTQKSLSLSPGK

SEQ ID NO: 719 - protein, 453 aa, artificial
  Synthetic polypeptide
ELQLQESGPGLVKPSETLSLTCTVSGGSISESSYYWGWIRQPPGKGLEWIGSIYYTGETYYAPSLKSRVTISVDTSKNQFSLKLSSVTAADTAVYYCARLRYGVGVPRYFDPWGQGTLVTVSSASTKGPSVFPLAPSSKSTSGGTAALGCLVKDYFPEPVTVSWNSGALTSGVHTFPAVLQSSGLYSLSSVVTVPSSSLGTQTYICNVNHKPSNTKVDKKVEPKSCDKTHTCPPCPAPELLGGPSVFLFPPKPKDTLMISRTPEVTCVVVDVSHEDPEVKFNWYVDGVEVHNAKTKPREEQYGSTYRVVSVLTVLHQDWLNGKEYKCKVSNKALPAPIEKTISKAKGQPREPQVYTLPPSRDELTKNQVSLWCLVKGFYPSDIAVEWESNGQPENNYKTTPPVLDSDGSFFLYSKLTVDKSRWQQGNVFSCSVMHEALHNHYTQKSLSLSPGK

SEQ ID NO: 720 - protein, 452 aa, artificial
  Synthetic polypeptide
ELQLQESGPGLVKPSETLSLTCTVSGGSISESSYYWGWIRQPPGKGLEWIGSIYYTGETYYAPSLKSRVTISVDTSKNQFSLKLSSVTAADTAVYYCARLRYGVGVPRYFDPWGQGTLVTVSSASTKGPSVFPLAPSSKSTSGGTAALGCLVKDYFPEPVTVSWNSGALTSGVHTFPAVLQSSGLYSLSSVVTVPSSSLGTQTYICNVNHKPSNTKVDKKVEPKSCDKTHTCPPCPAPELLGGPSVFLFPPKPKDTYITRETPEVTCVVVDVSHEDPEVKFNWYVDGVEVHNAKTKPREEQYGSTYRVVSVLTVLHQDWLNGKEYKCKVSNKALPAPIEKTISKAKGQPREPQVYTLPPSRDELTKNQVSLWCLVKGFYPSDIAVEWESNGQPENNYKTTPPVLDSDGSFFLYSKLTVDKSRWQQGNVFSCSVMHEALHNHYTQKSLSLSPG

SEQ ID NO: 721 - protein, 453 aa, artificial
  Synthetic polypeptide
ELQLQESGPGLVKPSETLSLTCTVSGGSISESSYYWGWIRQPPGKGLEWIGSIYYTGETYYAPSLKSRVTISVDTSKNQFSLKLSSVTAADTAVYYCARLRYGVGVPRYFDPWGQGTLVTVSSASTKGPSVFPLAPSSKSTSGGTAALGCLVKDYFPEPVTVSWNSGALTSGVHTFPAVLQSSGLYSLSSVVTVPSSSLGTQTYICNVNHKPSNTKVDKKVEPKSCDKTHTCPPCPAPELLGGPSVFLFPPKPKDTYITRETPEVTCVVVDVSHEDPEVKFNWYVDGVEVHNAKTKPREEQYGSTYRVVSVLTVLHQDWLNGKEYKCKVSNKALPAPIEKTISKAKGQPREPQVYTLPPSRDELTKNQVSLWCLVKGFYPSDIAVEWESNGQPENNYKTTPPVLDSDGSFFLYSKLTVDKSRWQQGNVFSCSVMHEALHNHYTQKSLSLSPGK

SEQ ID NO: 722 - protein, 453 aa, artificial
  Synthetic polypeptide
ELQLQESGPGLVKPSETLSLTCTVSGGSISESSYYWGWIRQPPGKGLEWIGSIYYTGETYYAPSLKSRVTISVDTSKNQFSLKLSSVTAADTAVYYCARLRYGVGVPRYFDPWGQGTLVTVSSASTKGPSVFPLAPSSKSTSGGTAALGCLVKDYFPEPVTVSWNSGALTSGVHTFPAVLQSSGLYSLSSVVTVPSSSLGTQTYICNVNHKPSNTKVDKKVEPKSCDKTHTCPPCPAPELLGGPSVFLFPPKPKDTLMISRTPEVTCVVVDVSHEDPEVKFNWYVDGVEVHNAKTKPREEQYGSTYRVVSVLTVLHQDWLNGKEYKCKVSNKALPAPIEKTISKAKGQPREPQVYTLPPSRDELTKNQVSLSCAVKGFYPSDIAVEWESNGQPENNYKTTPPVLDSDGSFFLVSKLTVDKSRWQQGNVFSCSVMHEALHNHYTQKSLSLSPGK

SEQ ID NO: 723 - protein, 452 aa, artificial
  Synthetic polypeptide
ELQLQESGPGLVKPSETLSLTCTVSGGSISESSYYWGWIRQPPGKGLEWIGSIYYTGETYYAPSLKSRVTISVDTSKNQFSLKLSSVTAADTAVYYCARLRYGVGVPRYFDPWGQGTLVTVSSASTKGPSVFPLAPSSKSTSGGTAALGCLVKDYFPEPVTVSWNSGALTSGVHTFPAVLQSSGLYSLSSVVTVPSSSLGTQTYICNVNHKPSNTKVDKKVEPKSCDKTHTCPPCPAPELLGGPSVFLFPPKPKDTYITRETPEVTCVVVDVSHEDPEVKFNWYVDGVEVHNAKTKPREEQYGSTYRVVSVLTVLHQDWLNGKEYKCKVSNKALPAPIEKTISKAKGQPREPQVYTLPPSRDELTKNQVSLSCAVKGFYPSDIAVEWESNGQPENNYKTTPPVLDSDGSFFLVSKLTVDKSRWQQGNVFSCSVMHEALHNHYTQKSLSLSPG

SEQ ID NO: 724 - protein, 453 aa, artificial
  Synthetic polypeptide
ELQLQESGPGLVKPSETLSLTCTVSGGSISESSYYWGWIRQPPGKGLEWIGSIYYTGETYYAPSLKSRVTISVDTSKNQFSLKLSSVTAADTAVYYCARLRYGVGVPRYFDPWGQGTLVTVSSASTKGPSVFPLAPSSKSTSGGTAALGCLVKDYFPEPVTVSWNSGALTSGVHTFPAVLQSSGLYSLSSVVTVPSSSLGTQTYICNVNHKPSNTKVDKKVEPKSCDKTHTCPPCPAPELLGGPSVFLFPPKPKDTYITRETPEVTCVVVDVSHEDPEVKFNWYVDGVEVHNAKTKPREEQYGSTYRVVSVLTVLHQDWLNGKEYKCKVSNKALPAPIEKTISKAKGQPREPQVYTLPPSRDELTKNQVSLSCAVKGFYPSDIAVEWESNGQPENNYKTTPPVLDSDGSFFLVSKLTVDKSRWQQGNVFSCSVMHEALHNHYTQKSLSLSPGK

SEQ ID NO: 725 - protein, 453 aa, artificial
  Synthetic polypeptide
ELQLQESGPGLVKPSETLSLTCTVSGGSISESSYYWGWIRQPPGKGLEWIGSIYYTGETYYAPSLKSRVTISVDTSKNQFSLKLSSVTAADTAVYYCARVKYGVGVPRYFDPWGQGTLVTVSSASTKGPSVFPLAPSSKSTSGGTAALGCLVKDYFPEPVTVSWNSGALTSGVHTFPAVLQSSGLYSLSSVVTVPSSSLGTQTYICNVNHKPSNTKVDKKVEPKSCDKTHTCPPCPAPELLGGPSVFLFPPKPKDTLMISRTPEVTCVVVDVSHEDPEVKFNWYVDGVEVHNAKTKPREEQYGSTYRVVSVLTVLHQDWLNGKEYKCKVSNKALPAPIEKTISKAKGQPREPQVYTLPPSRDELTKNQVSLTCLVKGFYPSDIAVEWESNGQPENNYKTTPPVLDSDGSFFLYSKLTVDKSRWQQGNVFSCSVMHEALHNHYTQKSLSLSPGK

SEQ ID NO: 726 - protein, 452 aa, artificial
  Synthetic polypeptide
ELQLQESGPGLVKPSETLSLTCTVSGGSISESSYYWGWIRQPPGKGLEWIGSIYYTGETYYAPSLKSRVTISVDTSKNQFSLKLSSVTAADTAVYYCARVKYGVGVPRYFDPWGQGTLVTVSSASTKGPSVFPLAPSSKSTSGGTAALGCLVKDYFPEPVTVSWNSGALTSGVHTFPAVLQSSGLYSLSSVVTVPSSSLGTQTYICNVNHKPSNTKVDKKVEPKSCDKTHTCPPCPAPELLGGPSVFLFPPKPKDTYITRETPEVTCVVVDVSHEDPEVKFNWYVDGVEVHNAKTKPREEQYGSTYRVVSVLTVLHQDWLNGKEYKCKVSNKALPAPIEKTISKAKGQPREPQVYTLPPSRDELTKNQVSLTCLVKGFYPSDIAVEWESNGQPENNYKTTPPVLDSDGSFFLYSKLTVDKSRWQQGNVFSCSVMHEALHNHYTQKSLSLSPG

SEQ ID NO: 727 - protein, 453 aa, artificial
  Synthetic polypeptide
ELQLQESGPGLVKPSETLSLTCTVSGGSISESSYYWGWIRQPPGKGLEWIGSIYYTGETYYAPSLKSRVTISVDTSKNQFSLKLSSVTAADTAVYYCARVKYGVGVPRYFDPWGQGTLVTVSSASTKGPSVFPLAPSSKSTSGGTAALGCLVKDYFPEPVTVSWNSGALTSGVHTFPAVLQSSGLYSLSSVVTVPSSSLGTQTYICNVNHKPSNTKVDKKVEPKSCDKTHTCPPCPAPELLGGPSVFLFPPKPKDTYITRETPEVTCVVVDVSHEDPEVKFNWYVDGVEVHNAKTKPREEQYGSTYRVVSVLTVLHQDWLNGKEYKCKVSNKALPAPIEKTISKAKGQPREPQVYTLPPSRDELTKNQVSLTCLVKGFYPSDIAVEWESNGQPENNYKTTPPVLDSDGSFFLYSKLTVDKSRWQQGNVFSCSVMHEALHNHYTQKSLSLSPGK

SEQ ID NO: 728 - protein, 453 aa, artificial
  Synthetic polypeptide
ELQLQESGPGLVKPSETLSLTCTVSGGSISESSYYWGWIRQPPGKGLEWIGSIYYTGETYYAPSLKSRVTISVDTSKNQFSLKLSSVTAADTAVYYCARVKYGVGVPRYFDPWGQGTLVTVSSASTKGPSVFPLAPSSKSTSGGTAALGCLVKDYFPEPVTVSWNSGALTSGVHTFPAVLQSSGLYSLSSVVTVPSSSLGTQTYICNVNHKPSNTKVDKKVEPKSCDKTHTCPPCPAPELLGGPSVFLFPPKPKDTLMISRTPEVTCVVVDVSHEDPEVKFNWYVDGVEVHNAKTKPREEQYGSTYRVVSVLTVLHQDWLNGKEYKCKVSNKALPAPIEKTISKAKGQPREPQVYTLPPSRDELTKNQVSLWCLVKGFYPSDIAVEWESNGQPENNYKTTPPVLDSDGSFFLYSKLTVDKSRWQQGNVFSCSVMHEALHNHYTQKSLSLSPGK

SEQ ID NO: 729 - protein, 452 aa, artificial
  Synthetic polypeptide
ELQLQESGPGLVKPSETLSLTCTVSGGSISESSYYWGWIRQPPGKGLEWIGSIYYTGETYYAPSLKSRVTISVDTSKNQFSLKLSSVTAADTAVYYCARVKYGVGVPRYFDPWGQGTLVTVSSASTKGPSVFPLAPSSKSTSGGTAALGCLVKDYFPEPVTVSWNSGALTSGVHTFPAVLQSSGLYSLSSVVTVPSSSLGTQTYICNVNHKPSNTKVDKKVEPKSCDKTHTCPPCPAPELLGGPSVFLFPPKPKDTYITRETPEVTCVVVDVSHEDPEVKFNWYVDGVEVHNAKTKPREEQYGSTYRVVSVLTVLHQDWLNGKEYKCKVSNKALPAPIEKTISKAKGQPREPQVYTLPPSRDELTKNQVSLWCLVKGFYPSDIAVEWESNGQPENNYKTTPPVLDSDGSFFLYSKLTVDKSRWQQGNVFSCSVMHEALHNHYTQKSLSLSPG

SEQ ID NO: 730 - protein, 453 aa, artificial
  Synthetic polypeptide
ELQLQESGPGLVKPSETLSLTCTVSGGSISESSYYWGWIRQPPGKGLEWIGSIYYTGETYYAPSLKSRVTISVDTSKNQFSLKLSSVTAADTAVYYCARVKYGVGVPRYFDPWGQGTLVTVSSASTKGPSVFPLAPSSKSTSGGTAALGCLVKDYFPEPVTVSWNSGALTSGVHTFPAVLQSSGLYSLSSVVTVPSSSLGTQTYICNVNHKPSNTKVDKKVEPKSCDKTHTCPPCPAPELLGGPSVFLFPPKPKDTYITRETPEVTCVVVDVSHEDPEVKFNWYVDGVEVHNAKTKPREEQYGSTYRVVSVLTVLHQDWLNGKEYKCKVSNKALPAPIEKTISKAKGQPREPQVYTLPPSRDELTKNQVSLWCLVKGFYPSDIAVEWESNGQPENNYKTTPPVLDSDGSFFLYSKLTVDKSRWQQGNVFSCSVMHEALHNHYTQKSLSLSPGK

SEQ ID NO: 731 - protein, 453 aa, artificial
  Synthetic polypeptide
ELQLQESGPGLVKPSETLSLTCTVSGGSISESSYYWGWIRQPPGKGLEWIGSIYYTGETYYAPSLKSRVTISVDTSKNQFSLKLSSVTAADTAVYYCARVKYGVGVPRYFDPWGQGTLVTVSSASTKGPSVFPLAPSSKSTSGGTAALGCLVKDYFPEPVTVSWNSGALTSGVHTFPAVLQSSGLYSLSSVVTVPSSSLGTQTYICNVNHKPSNTKVDKKVEPKSCDKTHTCPPCPAPELLGGPSVFLFPPKPKDTLMISRTPEVTCVVVDVSHEDPEVKFNWYVDGVEVHNAKTKPREEQYGSTYRVVSVLTVLHQDWLNGKEYKCKVSNKALPAPIEKTISKAKGQPREPQVYTLPPSRDELTKNQVSLSCAVKGFYPSDIAVEWESNGQPENNYKTTPPVLDSDGSFFLVSKLTVDKSRWQQGNVFSCSVMHEALHNHYTQKSLSLSPGK

SEQ ID NO: 732 - protein, 452 aa, artificial
  Synthetic polypeptide
ELQLQESGPGLVKPSETLSLTCTVSGGSISESSYYWGWIRQPPGKGLEWIGSIYYTGETYYAPSLKSRVTISVDTSKNQFSLKLSSVTAADTAVYYCARVKYGVGVPRYFDPWGQGTLVTVSSASTKGPSVFPLAPSSKSTSGGTAALGCLVKDYFPEPVTVSWNSGALTSGVHTFPAVLQSSGLYSLSSVVTVPSSSLGTQTYICNVNHKPSNTKVDKKVEPKSCDKTHTCPPCPAPELLGGPSVFLFPPKPKDTYITRETPEVTCVVVDVSHEDPEVKFNWYVDGVEVHNAKTKPREEQYGSTYRVVSVLTVLHQDWLNGKEYKCKVSNKALPAPIEKTISKAKGQPREPQVYTLPPSRDELTKNQVSLSCAVKGFYPSDIAVEWESNGQPENNYKTTPPVLDSDGSFFLVSKLTVDKSRWQQGNVFSCSVMHEALHNHYTQKSLSLSPG

SEQ ID NO: 733 - protein, 453 aa, artificial
  Synthetic polypeptide
ELQLQESGPGLVKPSETLSLTCTVSGGSISESSYYWGWIRQPPGKGLEWIGSIYYTGETYYAPSLKSRVTISVDTSKNQFSLKLSSVTAADTAVYYCARVKYGVGVPRYFDPWGQGTLVTVSSASTKGPSVFPLAPSSKSTSGGTAALGCLVKDYFPEPVTVSWNSGALTSGVHTFPAVLQSSGLYSLSSVVTVPSSSLGTQTYICNVNHKPSNTKVDKKVEPKSCDKTHTCPPCPAPELLGGPSVFLFPPKPKDTYITRETPEVTCVVVDVSHEDPEVKFNWYVDGVEVHNAKTKPREEQYGSTYRVVSVLTVLHQDWLNGKEYKCKVSNKALPAPIEKTISKAKGQPREPQVYTLPPSRDELTKNQVSLSCAVKGFYPSDIAVEWESNGQPENNYKTTPPVLDSDGSFFLVSKLTVDKSRWQQGNVFSCSVMHEALHNHYTQKSLSLSPGK

SEQ ID NO: 734 - protein, 453 aa, artificial
  Synthetic polypeptide
QLQLQESGPGLVKPSETLSLTCTVSGGSISTSSYYWGWIRQPPGKGLEWIGSIYYTGNTYYNPSLKSRVTISVDTSKNQFSLKLSSVTAADTAVYYCARVRYGVGVPRYFDPWGQGTLVTVSSASTKGPSVFPLAPSSKSTSGGTAALGCLVKDYFPEPVTVSWNSGALTSGVHTFPAVLQSSGLYSLSSVVTVPSSSLGTQTYICNVNHKPSNTKVDKKVEPKSCDKTHTCPPCPAPELLGGPSVFLFPPKPKDTLMISRTPEVTCVVVDVSHEDPEVKFNWYVDGVEVHNAKTKPREEQYGSTYRVVSVLTVLHQDWLNGKEYKCKVSNKALPAPIEKTISKAKGQPREPQVYTLPPSRDELTKNQVSLTCLVKGFYPSDIAVEWESNGQPENNYKTTPPVLDSDGSFFLYSKLTVDKSRWQQGNVFSCSVMHEALHNHYTQKSLSLSPGK

SEQ ID NO: 735 - protein, 452 aa, artificial
  Synthetic polypeptide
QLQLQESGPGLVKPSETLSLTCTVSGGSISTSSYYWGWIRQPPGKGLEWIGSIYYTGNTYYNPSLKSRVTISVDTSKNQFSLKLSSVTAADTAVYYCARVRYGVGVPRYFDPWGQGTLVTVSSASTKGPSVFPLAPSSKSTSGGTAALGCLVKDYFPEPVTVSWNSGALTSGVHTFPAVLQSSGLYSLSSVVTVPSSSLGTQTYICNVNHKPSNTKVDKKVEPKSCDKTHTCPPCPAPELLGGPSVFLFPPKPKDTYITRETPEVTCVVVDVSHEDPEVKFNWYVDGVEVHNAKTKPREEQYGSTYRVVSVLTVLHQDWLNGKEYKCKVSNKALPAPIEKTISKAKGQPREPQVYTLPPSRDELTKNQVSLTCLVKGFYPSDIAVEWESNGQPENNYKTTPPVLDSDGSFFLYSKLTVDKSRWQQGNVFSCSVMHEALHNHYTQKSLSLSPG

SEQ ID NO: 736 - protein, 453 aa, artificial
  Synthetic polypeptide
QLQLQESGPGLVKPSETLSLTCTVSGGSISTSSYYWGWIRQPPGKGLEWIGSIYYTGNTYYNPSLKSRVTISVDTSKNQFSLKLSSVTAADTAVYYCARVRYGVGVPRYFDPWGQGTLVTVSSASTKGPSVFPLAPSSKSTSGGTAALGCLVKDYFPEPVTVSWNSGALTSGVHTFPAVLQSSGLYSLSSVVTVPSSSLGTQTYICNVNHKPSNTKVDKKVEPKSCDKTHTCPPCPAPELLGGPSVFLFPPKPKDTYITRETPEVTCVVVDVSHEDPEVKFNWYVDGVEVHNAKTKPREEQYGSTYRVVSVLTVLHQDWLNGKEYKCKVSNKALPAPIEKTISKAKGQPREPQVYTLPPSRDELTKNQVSLTCLVKGFYPSDIAVEWESNGQPENNYKTTPPVLDSDGSFFLYSKLTVDKSRWQQGNVFSCSVMHEALHNHYTQKSLSLSPGK

SEQ ID NO: 737 - protein, 453 aa, artificial
  Synthetic polypeptide
QLQLQESGPGLVKPSETLSLTCTVSGGSISTSSYYWGWIRQPPGKGLEWIGSIYYTGNTYYNPSLKSRVTISVDTSKNQFSLKLSSVTAADTAVYYCARVRYGVGVPRYFDPWGQGTLVTVSSASTKGPSVFPLAPSSKSTSGGTAALGCLVKDYFPEPVTVSWNSGALTSGVHTFPAVLQSSGLYSLSSVVTVPSSSLGTQTYICNVNHKPSNTKVDKKVEPKSCDKTHTCPPCPAPELLGGPSVFLFPPKPKDTLMISRTPEVTCVVVDVSHEDPEVKFNWYVDGVEVHNAKTKPREEQYGSTYRVVSVLTVLHQDWLNGKEYKCKVSNKALPAPIEKTISKAKGQPREPQVYTLPPSRDELTKNQVSLWCLVKGFYPSDIAVEWESNGQPENNYKTTPPVLDSDGSFFLYSKLTVDKSRWQQGNVFSCSVMHEALHNHYTQKSLSLSPGK

SEQ ID NO: 738 - protein, 452 aa, artificial
  Synthetic polypeptide
QLQLQESGPGLVKPSETLSLTCTVSGGSISTSSYYWGWIRQPPGKGLEWIGSIYYTGNTYYNPSLKSRVTISVDTSKNQFSLKLSSVTAADTAVYYCARVRYGVGVPRYFDPWGQGTLVTVSSASTKGPSVFPLAPSSKSTSGGTAALGCLVKDYFPEPVTVSWNSGALTSGVHTFPAVLQSSGLYSLSSVVTVPSSSLGTQTYICNVNHKPSNTKVDKKVEPKSCDKTHTCPPCPAPELLGGPSVFLFPPKPKDTYITRETPEVTCVVVDVSHEDPEVKFNWYVDGVEVHNAKTKPREEQYGSTYRVVSVLTVLHQDWLNGKEYKCKVSNKALPAPIEKTISKAKGQPREPQVYTLPPSRDELTKNQVSLWCLVKGFYPSDIAVEWESNGQPENNYKTTPPVLDSDGSFFLYSKLTVDKSRWQQGNVFSCSVMHEALHNHYTQKSLSLSPG

SEQ ID NO: 739 - protein, 453 aa, artificial
  Synthetic polypeptide
QLQLQESGPGLVKPSETLSLTCTVSGGSISTSSYYWGWIRQPPGKGLEWIGSIYYTGNTYYNPSLKSRVTISVDTSKNQFSLKLSSVTAADTAVYYCARVRYGVGVPRYFDPWGQGTLVTVSSASTKGPSVFPLAPSSKSTSGGTAALGCLVKDYFPEPVTVSWNSGALTSGVHTFPAVLQSSGLYSLSSVVTVPSSSLGTQTYICNVNHKPSNTKVDKKVEPKSCDKTHTCPPCPAPELLGGPSVFLFPPKPKDTYITRETPEVTCVVVDVSHEDPEVKFNWYVDGVEVHNAKTKPREEQYGSTYRVVSVLTVLHQDWLNGKEYKCKVSNKALPAPIEKTISKAKGQPREPQVYTLPPSRDELTKNQVSLWCLVKGFYPSDIAVEWESNGQPENNYKTTPPVLDSDGSFFLYSKLTVDKSRWQQGNVFSCSVMHEALHNHYTQKSLSLSPGK

SEQ ID NO: 740 - protein, 453 aa, artificial
  Synthetic polypeptide
QLQLQESGPGLVKPSETLSLTCTVSGGSISTSSYYWGWIRQPPGKGLEWIGSIYYTGNTYYNPSLKSRVTISVDTSKNQFSLKLSSVTAADTAVYYCARVRYGVGVPRYFDPWGQGTLVTVSSASTKGPSVFPLAPSSKSTSGGTAALGCLVKDYFPEPVTVSWNSGALTSGVHTFPAVLQSSGLYSLSSVVTVPSSSLGTQTYICNVNHKPSNTKVDKKVEPKSCDKTHTCPPCPAPELLGGPSVFLFPPKPKDTLMISRTPEVTCVVVDVSHEDPEVKFNWYVDGVEVHNAKTKPREEQYGSTYRVVSVLTVLHQDWLNGKEYKCKVSNKALPAPIEKTISKAKGQPREPQVYTLPPSRDELTKNQVSLSCAVKGFYPSDIAVEWESNGQPENNYKTTPPVLDSDGSFFLVSKLTVDKSRWQQGNVFSCSVMHEALHNHYTQKSLSLSPGK

SEQ ID NO: 741 - protein, 452 aa, artificial
  Synthetic polypeptide
QLQLQESGPGLVKPSETLSLTCTVSGGSISTSSYYWGWIRQPPGKGLEWIGSIYYTGNTYYNPSLKSRVTISVDTSKNQFSLKLSSVTAADTAVYYCARVRYGVGVPRYFDPWGQGTLVTVSSASTKGPSVFPLAPSSKSTSGGTAALGCLVKDYFPEPVTVSWNSGALTSGVHTFPAVLQSSGLYSLSSVVTVPSSSLGTQTYICNVNHKPSNTKVDKKVEPKSCDKTHTCPPCPAPELLGGPSVFLFPPKPKDTYITRETPEVTCVVVDVSHEDPEVKFNWYVDGVEVHNAKTKPREEQYGSTYRVVSVLTVLHQDWLNGKEYKCKVSNKALPAPIEKTISKAKGQPREPQVYTLPPSRDELTKNQVSLSCAVKGFYPSDIAVEWESNGQPENNYKTTPPVLDSDGSFFLVSKLTVDKSRWQQGNVFSCSVMHEALHNHYTQKSLSLSPG

SEQ ID NO: 742 - protein, 453 aa, artificial
  Synthetic polypeptide
QLQLQESGPGLVKPSETLSLTCTVSGGSISTSSYYWGWIRQPPGKGLEWIGSIYYTGNTYYNPSLKSRVTISVDTSKNQFSLKLSSVTAADTAVYYCARVRYGVGVPRYFDPWGQGTLVTVSSASTKGPSVFPLAPSSKSTSGGTAALGCLVKDYFPEPVTVSWNSGALTSGVHTFPAVLQSSGLYSLSSVVTVPSSSLGTQTYICNVNHKPSNTKVDKKVEPKSCDKTHTCPPCPAPELLGGPSVFLFPPKPKDTYITRETPEVTCVVVDVSHEDPEVKFNWYVDGVEVHNAKTKPREEQYGSTYRVVSVLTVLHQDWLNGKEYKCKVSNKALPAPIEKTISKAKGQPREPQVYTLPPSRDELTKNQVSLSCAVKGFYPSDIAVEWESNGQPENNYKTTPPVLDSDGSFFLVSKLTVDKSRWQQGNVFSCSVMHEALHNHYTQKSLSLSPGK

SEQ ID NO: 743 - protein, 452 aa, artificial
  Synthetic polypeptide
QLQLQESGPGLVKPSETLSLTCTVSGGSITSSNYYWGWIRQPPGKGLEWIGSIDYTGSTYYNPSLKSRVTISVDTSKNQFSLKLSSVTAADTAVYYCARGKYYETYLGFDVWGQGTLVTVSSASTKGPSVFPLAPSSKSTSGGTAALGCLVKDYFPEPVTVSWNSGALTSGVHTFPAVLQSSGLYSLSSVVTVPSSSLGTQTYICNVNHKPSNTKVDKKVEPKSCDKTHTCPPCPAPELLGGPSVFLFPPKPKDTLMISRTPEVTCVVVDVSHEDPEVKFNWYVDGVEVHNAKTKPREEQYGSTYRVVSVLTVLHQDWLNGKEYKCKVSNKALPAPIEKTISKAKGQPREPQVYTLPPSRDELTKNQVSLTCLVKGFYPSDIAVEWESNGQPENNYKTTPPVLDSDGSFFLYSKLTVDKSRWQQGNVFSCSVMHEALHNHYTQKSLSLSPGK

SEQ ID NO: 744 - protein, 451 aa, artificial
  Synthetic polypeptide
QLQLQESGPGLVKPSETLSLTCTVSGGSITSSNYYWGWIRQPPGKGLEWIGSIDYTGSTYYNPSLKSRVTISVDTSKNQFSLKLSSVTAADTAVYYCARGKYYETYLGFDVWGQGTLVTVSSASTKGPSVFPLAPSSKSTSGGTAALGCLVKDYFPEPVTVSWNSGALTSGVHTFPAVLQSSGLYSLSSVVTVPSSSLGTQTYICNVNHKPSNTKVDKKVEPKSCDKTHTCPPCPAPELLGGPSVFLFPPKPKDTLYITREPEVTCVVVDVSHEDPEVKFNWYVDGVEVHNAKTKPREEQYGSTYRVVSVLTVLHQDWLNGKEYKCKVSNKALPAPIEKTISKAKGQPREPQVYTLPPSRDELTKNQVSLTCLVKGFYPSDIAVEWESNGQPENNYKTTPPVLDSDGSFFLYSKLTVDKSRWQQGNVFSCSVMHEALHNHYTQKSLSLSPG

SEQ ID NO: 745 - protein, 452 aa, artificial
  Synthetic polypeptide
QLQLQESGPGLVKPSETLSLTCTVSGGSITSSNYYWGWIRQPPGKGLEWIGSIDYTGSTYYNPSLKSRVTISVDTSKNQFSLKLSSVTAADTAVYYCARGKYYETYLGFDVWGQGTLVTVSSASTKGPSVFPLAPSSKSTSGGTAALGCLVKDYFPEPVTVSWNSGALTSGVHTFPAVLQSSGLYSLSSVVTVPSSSLGTQTYICNVNHKPSNTKVDKKVEPKSCDKTHTCPPCPAPELLGGPSVFLFPPKPKDTLYITREPEVTCVVVDVSHEDPEVKFNWYVDGVEVHNAKTKPREEQYGSTYRVVSVLTVLHQDWLNGKEYKCKVSNKALPAPIEKTISKAKGQPREPQVYTLPPSRDELTKNQVSLTCLVKGFYPSDIAVEWESNGQPENNYKTTPPVLDSDGSFFLYSKLTVDKSRWQQGNVFSCSVMHEALHNHYTQKSLSLSPGK

SEQ ID NO: 746 - protein, 452 aa, artificial
  Synthetic polypeptide
QLQLQESGPGLVKPSETLSLTCTVSGGSITSSNYYWGWIRQPPGKGLEWIGSIDYTGSTYYNPSLKSRVTISVDTSKNQFSLKLSSVTAADTAVYYCARGKYYETYLGFDVWGQGTLVTVSSASTKGPSVFPLAPSSKSTSGGTAALGCLVKDYFPEPVTVSWNSGALTSGVHTFPAVLQSSGLYSLSSVVTVPSSSLGTQTYICNVNHKPSNTKVDKKVEPKSCDKTHTCPPCPAPELLGGPSVFLFPPKPKDTLMISRTPEVTCVVVDVSHEDPEVKFNWYVDGVEVHNAKTKPREEQYGSTYRVVSVLTVLHQDWLNGKEYKCKVSNKALPAPIEKTISKAKGQPREPQVYTLPPSRDELTKNQVSLWCLVKGFYPSDIAVEWESNGQPENNYKTTPPVLDSDGSFFLYSKLTVDKSRWQQGNVFSCSVMHEALHNHYTQKSLSLSPGK

SEQ ID NO: 747 - protein, 451 aa, artificial
  Synthetic polypeptide
QLQLQESGPGLVKPSETLSLTCTVSGGSITSSNYYWGWIRQPPGKGLEWIGSIDYTGSTYYNPSLKSRVTISVDTSKNQFSLKLSSVTAADTAVYYCARGKYYETYLGFDVWGQGTLVTVSSASTKGPSVFPLAPSSKSTSGGTAALGCLVKDYFPEPVTVSWNSGALTSGVHTFPAVLQSSGLYSLSSVVTVPSSSLGTQTYICNVNHKPSNTKVDKKVEPKSCDKTHTCPPCPAPELLGGPSVFLFPPKPKDTLYITREPEVTCVVVDVSHEDPEVKFNWYVDGVEVHNAKTKPREEQYGSTYRVVSVLTVLHQDWLNGKEYKCKVSNKALPAPIEKTISKAKGQPREPQVYTLPPSRDELTKNQVSLWCLVKGFYPSDIAVEWESNGQPENNYKTTPPVLDSDGSFFLYSKLTVDKSRWQQGNVFSCSVMHEALHNHYTQKSLSLSPG

SEQ ID NO: 748 - protein, 452 aa, artificial
  Synthetic polypeptide
QLQLQESGPGLVKPSETLSLTCTVSGGSITSSNYYWGWIRQPPGKGLEWIGSIDYTGSTYYNPSLKSRVTISVDTSKNQFSLKLSSVTAADTAVYYCARGKYYETYLGFDVWGQGTLVTVSSASTKGPSVFPLAPSSKSTSGGTAALGCLVKDYFPEPVTVSWNSGALTSGVHTFPAVLQSSGLYSLSSVVTVPSSSLGTQTYICNVNHKPSNTKVDKKVEPKSCDKTHTCPPCPAPELLGGPSVFLFPPKPKDTLYITREPEVTCVVVDVSHEDPEVKFNWYVDGVEVHNAKTKPREEQYGSTYRVVSVLTVLHQDWLNGKEYKCKVSNKALPAPIEKTISKAKGQPREPQVYTLPPSRDELTKNQVSLWCLVKGFYPSDIAVEWESNGQPENNYKTTPPVLDSDGSFFLYSKLTVDKSRWQQGNVFSCSVMHEALHNHYTQKSLSLSPGK

SEQ ID NO: 749 - protein, 452 aa, artificial
  Synthetic polypeptide
QLQLQESGPGLVKPSETLSLTCTVSGGSITSSNYYWGWIRQPPGKGLEWIGSIDYTGSTYYNPSLKSRVTISVDTSKNQFSLKLSSVTAADTAVYYCARGKYYETYLGFDVWGQGTLVTVSSASTKGPSVFPLAPSSKSTSGGTAALGCLVKDYFPEPVTVSWNSGALTSGVHTFPAVLQSSGLYSLSSVVTVPSSSLGTQTYICNVNHKPSNTKVDKKVEPKSCDKTHTCPPCPAPELLGGPSVFLFPPKPKDTLMISRTPEVTCVVVDVSHEDPEVKFNWYVDGVEVHNAKTKPREEQYGSTYRVVSVLTVLHQDWLNGKEYKCKVSNKALPAPIEKTISKAKGQPREPQVYTLPPSRDELTKNQVSLSCAVKGFYPSDIAVEWESNGQPENNYKTTPPVLDSDGSFFLVSKLTVDKSRWQQGNVFSCSVMHEALHNHYTQKSLSLSPGK

SEQ ID NO: 750 - protein, 451 aa, artificial
  Synthetic polypeptide
QLQLQESGPGLVKPSETLSLTCTVSGGSITSSNYYWGWIRQPPGKGLEWIGSIDYTGSTYYNPSLKSRVTISVDTSKNQFSLKLSSVTAADTAVYYCARGKYYETYLGFDVWGQGTLVTVSSASTKGPSVFPLAPSSKSTSGGTAALGCLVKDYFPEPVTVSWNSGALTSGVHTFPAVLQSSGLYSLSSVVTVPSSSLGTQTYICNVNHKPSNTKVDKKVEPKSCDKTHTCPPCPAPELLGGPSVFLFPPKPKDTLYITREPEVTCVVVDVSHEDPEVKFNWYVDGVEVHNAKTKPREEQYGSTYRVVSVLTVLHQDWLNGKEYKCKVSNKALPAPIEKTISKAKGQPREPQVYTLPPSRDELTKNQVSLSCAVKGFYPSDIAVEWESNGQPENNYKTTPPVLDSDGSFFLVSKLTVDKSRWQQGNVFSCSVMHEALHNHYTQKSLSLSPG

SEQ ID NO: 751 - protein, 452 aa, artificial
  Synthetic polypeptide
QLQLQESGPGLVKPSETLSLTCTVSGGSITSSNYYWGWIRQPPGKGLEWIGSIDYTGSTYYNPSLKSRVTISVDTSKNQFSLKLSSVTAADTAVYYCARGKYYETYLGFDVWGQGTLVTVSSASTKGPSVFPLAPSSKSTSGGTAALGCLVKDYFPEPVTVSWNSGALTSGVHTFPAVLQSSGLYSLSSVVTVPSSSLGTQTYICNVNHKPSNTKVDKKVEPKSCDKTHTCPPCPAPELLGGPSVFLFPPKPKDTLYITREPEVTCVVVDVSHEDPEVKFNWYVDGVEVHNAKTKPREEQYGSTYRVVSVLTVLHQDWLNGKEYKCKVSNKALPAPIEKTISKAKGQPREPQVYTLPPSRDELTKNQVSLSCAVKGFYPSDIAVEWESNGQPENNYKTTPPVLDSDGSFFLVSKLTVDKSRWQQGNVFSCSVMHEALHNHYTQKSLSLSPGK

SEQ ID NO: 752 - protein, 452 aa, Artificial Sequence
  Synthetic polypeptide
QLQLQESGPGLVKPSETLSLTCTVSGGSITASNTYWGWIRQPPGKGLEWIGSIDYTGSTYYNPSLKSRVTISVDTSKNQFSLKLSSVTAADTAVYYCATGKYYETYLGFDVWGQGTLVTVSSASTKGPSVFPLAPSSKSTSGGTAALGCLVKDYFPEPVTVSWNSGALTSGVHTFPAVLQSSGLYSLSSVVTVPSSSLGTQTYICNVNHKPSNTKVDKKVEPKSCDKTHTCPPCPAPEAAGGPSVFLFPPKPKDTLMISRTPEVTCVVVDVSHEDPEVKFNWYVDGVEVHNAKTKPREEQYNSTYRVVSVLTVLHQDWLNGKEYKCKVSNKALPAPIEKTISKAKGQPREPQVYTLPPCRDELTKNQVSLWCLVKGFYPSDIAVEWESNGQPENNYKTTPPVLDSDGSFFLYSKLTVDKSRWQQGNVFSCSVLHEALHSHYTQKSLSLSPGK

SEQ ID NO: 753 - protein, 452 aa, Artificial Sequence
  Synthetic polypeptide
QLQLQESGPGLVKPSETLSLTCTVSGGSITASNTYWGWIRQPPGKGLEWIGSIDYTGSTYYNPSLKSRVTISVDTSKNQFSLKLSSVTAADTAVYYCATGKYYETYLGFDVWGQGTLVTVSSASTKGPSVFPLAPSSKSTSGGTAALGCLVKDYFPEPVTVSWNSGALTSGVHTFPAVLQSSGLYSLSSVVTVPSSSLGTQTYICNVNHKPSNTKVDKKVEPKSCDKTHTCPPCPAPEAAGGPSVFLFPPKPKDTLMISRTPEVTCVVVDVSHEDPEVKFNWYVDGVEVHNAKTKPREEQYNSTYRVVSVLTVLHQDWLNGKEYKCKVSNKALPAPIEKTISKAKGQPREPQVCTLPPSRDELTKNQVSLSCAVKGFYPSDIAVEWESNGQPENNYKTTPPVLDSDGSFFLVSKLTVDKSRWQQGNVFSCSVLHEALHSHYTQKSLSLSPGK

SEQ ID NO: 754 - protein, 452 aa, Artificial Sequence
  Synthetic polypeptide
QLQLQESGPGLVKPSETLSLTCTVSGGSITASNTYWGWIRQPPGKGLEWIGSIDYTGSTYYNPSLKSRVTISVDTSKNQFSLKLSSVTAADTAVYYCATGKYYETYLGFDVWGQGTLVTVSSASTKGPSVFPLAPSSKSTSGGTAALGCLVKDYFPEPVTVSWNSGALTSGVHTFPAVLQSSGLYSLSSVVTVPSSSLGTQTYICNVNHKPSNTKVDKKVEPKSCDKTHTCPPCPAPEAAGGPSVFLFPPKPKDTLMISRTPEVTCVVVDVSHEDPEVKFNWYVDGVEVHNAKTKPREEQYNSTYRVVSVLTVLHQDWLNGKEYKCKVSNKALPAPIEKTISKAKGQPREPQVYTLPPSRDELTKNQVSLWCLVKGFYPSDIAVEWESNGQPENNYKTTPPVLDSDGSFFLYSKLTVDKSRWQQGNVFSCSVLHEALHSHYTQKSLSLSPGK

SEQ ID NO: 755 - protein, 452 aa, Artificial Sequence
  Synthetic polypeptide
QLQLQESGPGLVKPSETLSLTCTVSGGSITASNTYWGWIRQPPGKGLEWIGSIDYTGSTYYNPSLKSRVTISVDTSKNQFSLKLSSVTAADTAVYYCATGKYYETYLGFDVWGQGTLVTVSSASTKGPSVFPLAPSSKSTSGGTAALGCLVKDYFPEPVTVSWNSGALTSGVHTFPAVLQSSGLYSLSSVVTVPSSSLGTQTYICNVNHKPSNTKVDKKVEPKSCDKTHTCPPCPAPEAAGGPSVFLFPPKPKDTLMISRTPEVTCVVVDVSHEDPEVKFNWYVDGVEVHNAKTKPREEQYNSTYRVVSVLTVLHQDWLNGKEYKCKVSNKALPAPIEKTISKAKGQPREPQVYTLPPSRDELTKNQVSLSCAVKGFYPSDIAVEWESNGQPENNYKTTPPVLDSDGSFFLVSKLTVDKSRWQQGNVFSCSVLHEALHSHYTQKSLSLSPGK

SEQ ID NO: 756 - protein, 452 aa, Artificial Sequence
  Synthetic polypeptide
QLQLQESGPGLVKPSETLSLTCTVSGGSITASNTYWGWIRQPPGKGLEWIGSIDYTGSTYYNPSLKSRVTISVDTSKNQFSLKLSSVTAADTAVYYCATGKYYETYLGFDVWGQGTLVTVSSASTKGPSVFPLAPSSKSTSGGTAALGCLVKDYFPEPVTVSWNSGALTSGVHTFPAVLQSSGLYSLSSVVTVPSSSLGTQTYICNVNHKPSNTKVDKKVEPKSCDKTHTCPPCPAPEAAGGPSVFLFPPKPKDTLYITREPEVTCVVVDVSHEDPEVKFNWYVDGVEVHNAKTKPREEQYNSTYRVVSVLTVLHQDWLNGKEYKCKVSNKALPAPIEKTISKAKGQPREPQVYTLPPCRDELTKNQVSLWCLVKGFYPSDIAVEWESNGQPENNYKTTPPVLDSDGSFFLYSKLTVDKSRWQQGNVFSCSVMHEALHNHYTQKSLSLSPGK

SEQ ID NO: 757 - protein, 452 aa, Artificial Sequence
  Synthetic polypeptide
QLQLQESGPGLVKPSETLSLTCTVSGGSITASNTYWGWIRQPPGKGLEWIGSIDYTGSTYYNPSLKSRVTISVDTSKNQFSLKLSSVTAADTAVYYCATGKYYETYLGFDVWGQGTLVTVSSASTKGPSVFPLAPSSKSTSGGTAALGCLVKDYFPEPVTVSWNSGALTSGVHTFPAVLQSSGLYSLSSVVTVPSSSLGTQTYICNVNHKPSNTKVDKKVEPKSCDKTHTCPPCPAPEAAGGPSVFLFPPKPKDTLYITREPEVTCVVVDVSHEDPEVKFNWYVDGVEVHNAKTKPREEQYNSTYRVVSVLTVLHQDWLNGKEYKCKVSNKALPAPIEKTISKAKGQPREPQVCTLPPSRDELTKNQVSLSCAVKGFYPSDIAVEWESNGQPENNYKTTPPVLDSDGSFFLVSKLTVDKSRWQQGNVFSCSVMHEALHNHYTQKSLSLSPGK

SEQ ID NO: 758 - protein, 452 aa, Artificial Sequence
  Synthetic polypeptide
QLQLQESGPGLVKPSETLSLTCTVSGGSITASNTYWGWIRQPPGKGLEWIGSIDYTGSTYYNPSLKSRVTISVDTSKNQFSLKLSSVTAADTAVYYCATGKYYETYLGFDVWGQGTLVTVSSASTKGPSVFPLAPSSKSTSGGTAALGCLVKDYFPEPVTVSWNSGALTSGVHTFPAVLQSSGLYSLSSVVTVPSSSLGTQTYICNVNHKPSNTKVDKKVEPKSCDKTHTCPPCPAPEAAGGPSVFLFPPKPKDTLYITREPEVTCVVVDVSHEDPEVKFNWYVDGVEVHNAKTKPREEQYNSTYRVVSVLTVLHQDWLNGKEYKCKVSNKALPAPIEKTISKAKGQPREPQVYTLPPSRDELTKNQVSLWCLVKGFYPSDIAVEWESNGQPENNYKTTPPVLDSDGSFFLYSKLTVDKSRWQQGNVFSCSVMHEALHNHYTQKSLSLSPGK

SEQ ID NO: 759 - protein, 452 aa, Artificial Sequence
  Synthetic polypeptide
QLQLQESGPGLVKPSETLSLTCTVSGGSITASNTYWGWIRQPPGKGLEWIGSIDYTGSTYYNPSLKSRVTISVDTSKNQFSLKLSSVTAADTAVYYCATGKYYETYLGFDVWGQGTLVTVSSASTKGPSVFPLAPSSKSTSGGTAALGCLVKDYFPEPVTVSWNSGALTSGVHTFPAVLQSSGLYSLSSVVTVPSSSLGTQTYICNVNHKPSNTKVDKKVEPKSCDKTHTCPPCPAPEAAGGPSVFLFPPKPKDTLYITREPEVTCVVVDVSHEDPEVKFNWYVDGVEVHNAKTKPREEQYNSTYRVVSVLTVLHQDWLNGKEYKCKVSNKALPAPIEKTISKAKGQPREPQVYTLPPSRDELTKNQVSLSCAVKGFYPSDIAVEWESNGQPENNYKTTPPVLDSDGSFFLVSKLTVDKSRWQQGNVFSCSVMHEALHNHYTQKSLSLSPGK

SEQ ID NO: 760 - protein, 452 aa, Artificial Sequence
  Synthetic polypeptide
QLQLQESGPGLVKPSETLSLTCTVSGGSITASNTYWGWIRQPPGKGLEWIGSIDYTGSTYYNPSLKSRVTISVDTSKNQFSLKLSSVTAADTAVYYCATGKYYETYLGFDVWGQGTLVTVSSASTKGPSVFPLAPSSKSTSGGTAALGCLVKDYFPEPVTVSWNSGALTSGVHTFPAVLQSSGLYSLSSVVTVPSSSLGTQTYICNVNHKPSNTKVDKKVEPKSCDKTHTCPPCPAPELLGGPSVFLFPPKPKDTLMISRTPEVTCVVVDVSHEDPEVKFNWYVDGVEVHNAKTKPREEQYGSTYRVVSVLTVLHQDWLNGKEYKCKVSNKALPAPIEKTISKAKGQPREPQVYTLPPCRDELTKNQVSLWCLVKGFYPSDIAVEWESNGQPENNYKTTPPVLDSDGSFFLYSKLTVDKSRWQQGNVFSCSVLHEALHSHYTQKSLSLSPGK

SEQ ID NO: 761 - protein, 452 aa, Artificial Sequence
  Synthetic polypeptide
QLQLQESGPGLVKPSETLSLTCTVSGGSITASNTYWGWIRQPPGKGLEWIGSIDYTGSTYYNPSLKSRVTISVDTSKNQFSLKLSSVTAADTAVYYCATGKYYETYLGFDVWGQGTLVTVSSASTKGPSVFPLAPSSKSTSGGTAALGCLVKDYFPEPVTVSWNSGALTSGVHTFPAVLQSSGLYSLSSVVTVPSSSLGTQTYICNVNHKPSNTKVDKKVEPKSCDKTHTCPPCPAPELLGGPSVFLFPPKPKDTLMISRTPEVTCVVVDVSHEDPEVKFNWYVDGVEVHNAKTKPREEQYGSTYRVVSVLTVLHQDWLNGKEYKCKVSNKALPAPIEKTISKAKGQPREPQVCTLPPSRDELTKNQVSLSCAVKGFYPSDIAVEWESNGQPENNYKTTPPVLDSDGSFFLVSKLTVDKSRWQQGNVFSCSVLHEALHSHYTQKSLSLSPGK

SEQ ID NO: 762 - protein, 452 aa, Artificial Sequence
  Synthetic polypeptide
QLQLQESGPGLVKPSETLSLTCTVSGGSITASNTYWGWIRQPPGKGLEWIGSIDYTGSTYYNPSLKSRVTISVDTSKNQFSLKLSSVTAADTAVYYCATGKYYETYLGFDVWGQGTLVTVSSASTKGPSVFPLAPSSKSTSGGTAALGCLVKDYFPEPVTVSWNSGALTSGVHTFPAVLQSSGLYSLSSVVTVPSSSLGTQTYICNVNHKPSNTKVDKKVEPKSCDKTHTCPPCPAPELLGGPSVFLFPPKPKDTLMISRTPEVTCVVVDVSHEDPEVKFNWYVDGVEVHNAKTKPREEQYGSTYRVVSVLTVLHQDWLNGKEYKCKVSNKALPAPIEKTISKAKGQPREPQVYTLPPSRDELTKNQVSLWCLVKGFYPSDIAVEWESNGQPENNYKTTPPVLDSDGSFFLYSKLTVDKSRWQQGNVFSCSVLHEALHSHYTQKSLSLSPGK

SEQ ID NO: 763 - protein, 452 aa, Artificial Sequence
  Synthetic polypeptide
QLQLQESGPGLVKPSETLSLTCTVSGGSITASNTYWGWIRQPPGKGLEWIGSIDYTGSTYYNPSLKSRVTISVDTSKNQFSLKLSSVTAADTAVYYCATGKYYETYLGFDVWGQGTLVTVSSASTKGPSVFPLAPSSKSTSGGTAALGCLVKDYFPEPVTVSWNSGALTSGVHTFPAVLQSSGLYSLSSVVTVPSSSLGTQTYICNVNHKPSNTKVDKKVEPKSCDKTHTCPPCPAPELLGGPSVFLFPPKPKDTLMISRTPEVTCVVVDVSHEDPEVKFNWYVDGVEVHNAKTKPREEQYGSTYRVVSVLTVLHQDWLNGKEYKCKVSNKALPAPIEKTISKAKGQPREPQVYTLPPSRDELTKNQVSLSCAVKGFYPSDIAVEWESNGQPENNYKTTPPVLDSDGSFFLVSKLTVDKSRWQQGNVFSCSVLHEALHSHYTQKSLSLSPGK

SEQ ID NO: 764 - protein, 452 aa, Artificial Sequence
  Synthetic polypeptide
QLQLQESGPGLVKPSETLSLTCTVSGGSITASNTYWGWIRQPPGKGLEWIGSIDYTGSTYYNPSLKSRVTISVDTSKNQFSLKLSSVTAADTAVYYCATGKYYETYLGFDVWGQGTLVTVSSASTKGPSVFPLAPSSKSTSGGTAALGCLVKDYFPEPVTVSWNSGALTSGVHTFPAVLQSSGLYSLSSVVTVPSSSLGTQTYICNVNHKPSNTKVDKKVEPKSCDKTHTCPPCPAPELLGGPSVFLFPPKPKDTLYITREPEVTCVVVDVSHEDPEVKFNWYVDGVEVHNAKTKPREEQYGSTYRVVSVLTVLHQDWLNGKEYKCKVSNKALPAPIEKTISKAKGQPREPQVYTLPPCRDELTKNQVSLWCLVKGFYPSDIAVEWESNGQPENNYKTTPPVLDSDGSFFLYSKLTVDKSRWQQGNVFSCSVMHEALHNHYTQKSLSLSPGK

SEQ ID NO: 765 - protein, 452 aa, Artificial Sequence
  Synthetic polypeptide
QLQLQESGPGLVKPSETLSLTCTVSGGSITASNTYWGWIRQPPGKGLEWIGSIDYTGSTYYNPSLKSRVTISVDTSKNQFSLKLSSVTAADTAVYYCATGKYYETYLGFDVWGQGTLVTVSSASTKGPSVFPLAPSSKSTSGGTAALGCLVKDYFPEPVTVSWNSGALTSGVHTFPAVLQSSGLYSLSSVVTVPSSSLGTQTYICNVNHKPSNTKVDKKVEPKSCDKTHTCPPCPAPELLGGPSVFLFPPKPKDTLYITREPEVTCVVVDVSHEDPEVKFNWYVDGVEVHNAKTKPREEQYGSTYRVVSVLTVLHQDWLNGKEYKCKVSNKALPAPIEKTISKAKGQPREPQVCTLPPSRDELTKNQVSLSCAVKGFYPSDIAVEWESNGQPENNYKTTPPVLDSDGSFFLVSKLTVDKSRWQQGNVFSCSVMHEALHNHYTQKSLSLSPGK

SEQ ID NO: 766 - protein, 452 aa, Artificial Sequence
  Synthetic polypeptide
QLQLQESGPGLVKPSETLSLTCTVSGGSITASNTYWGWIRQPPGKGLEWIGSIDYTGSTYYNPSLKSRVTISVDTSKNQFSLKLSSVTAADTAVYYCATGKYYETYLGFDVWGQGTLVTVSSASTKGPSVFPLAPSSKSTSGGTAALGCLVKDYFPEPVTVSWNSGALTSGVHTFPAVLQSSGLYSLSSVVTVPSSSLGTQTYICNVNHKPSNTKVDKKVEPKSCDKTHTCPPCPAPELLGGPSVFLFPPKPKDTLYITREPEVTCVVVDVSHEDPEVKFNWYVDGVEVHNAKTKPREEQYGSTYRVVSVLTVLHQDWLNGKEYKCKVSNKALPAPIEKTISKAKGQPREPQVYTLPPSRDELTKNQVSLWCLVKGFYPSDIAVEWESNGQPENNYKTTPPVLDSDGSFFLYSKLTVDKSRWQQGNVFSCSVMHEALHNHYTQKSLSLSPGK

SEQ ID NO: 767 - protein, 452 aa, Artificial Sequence
  Synthetic polypeptide
QLQLQESGPGLVKPSETLSLTCTVSGGSITASNTYWGWIRQPPGKGLEWIGSIDYTGSTYYNPSLKSRVTISVDTSKNQFSLKLSSVTAADTAVYYCATGKYYETYLGFDVWGQGTLVTVSSASTKGPSVFPLAPSSKSTSGGTAALGCLVKDYFPEPVTVSWNSGALTSGVHTFPAVLQSSGLYSLSSVVTVPSSSLGTQTYICNVNHKPSNTKVDKKVEPKSCDKTHTCPPCPAPELLGGPSVFLFPPKPKDTLYITREPEVTCVVVDVSHEDPEVKFNWYVDGVEVHNAKTKPREEQYGSTYRVVSVLTVLHQDWLNGKEYKCKVSNKALPAPIEKTISKAKGQPREPQVYTLPPSRDELTKNQVSLSCAVKGFYPSDIAVEWESNGQPENNYKTTPPVLDSDGSFFLVSKLTVDKSRWQQGNVFSCSVMHEALHNHYTQKSLSLSPGK

SEQ ID NO: 768 - protein, 452 aa, Artificial Sequence
  Synthetic polypeptide
ELQLQESGPGLVKPSETLSLTCTVSGGSITASNTYWGWIRQPPGKGLEWIGSIDYTGSTYYNPSLKSRVTISVDTSKNQFSLKLSSVTAADTAVYYCATGKYYETYLGFDVWGQGTLVTVSSASTKGPSVFPLAPSSKSTSGGTAALGCLVKDYFPEPVTVSWNSGALTSGVHTFPAVLQSSGLYSLSSVVTVPSSSLGTQTYICNVNHKPSNTKVDKKVEPKSCDKTHTCPPCPAPEAAGGPSVFLFPPKPKDTLMISRTPEVTCVVVDVSHEDPEVKFNWYVDGVEVHNAKTKPREEQYNSTYRVVSVLTVLHQDWLNGKEYKCKVSNKALPAPIEKTISKAKGQPREPQVYTLPPCRDELTKNQVSLWCLVKGFYPSDIAVEWESNGQPENNYKTTPPVLDSDGSFFLYSKLTVDKSRWQQGNVFSCSVLHEALHSHYTQKSLSLSPGK

SEQ ID NO: 769 - protein, 452 aa, Artificial Sequence
  Synthetic polypeptide
ELQLQESGPGLVKPSETLSLTCTVSGGSITASNTYWGWIRQPPGKGLEWIGSIDYTGSTYYNPSLKSRVTISVDTSKNQFSLKLSSVTAADTAVYYCATGKYYETYLGFDVWGQGTLVTVSSASTKGPSVFPLAPSSKSTSGGTAALGCLVKDYFPEPVTVSWNSGALTSGVHTFPAVLQSSGLYSLSSVVTVPSSSLGTQTYICNVNHKPSNTKVDKKVEPKSCDKTHTCPPCPAPEAAGGPSVFLFPPKPKDTLMISRTPEVTCVVVDVSHEDPEVKFNWYVDGVEVHNAKTKPREEQYNSTYRVVSVLTVLHQDWLNGKEYKCKVSNKALPAPIEKTISKAKGQPREPQVCTLPPSRDELTKNQVSLSCAVKGFYPSDIAVEWESNGQPENNYKTTPPVLDSDGSFFLVSKLTVDKSRWQQGNVFSCSVLHEALHSHYTQKSLSLSPGK

SEQ ID NO: 770 - protein, 452 aa, Artificial Sequence
  Synthetic polypeptide
ELQLQESGPGLVKPSETLSLTCTVSGGSITASNTYWGWIRQPPGKGLEWIGSIDYTGSTYYNPSLKSRVTISVDTSKNQFSLKLSSVTAADTAVYYCATGKYYETYLGFDVWGQGTLVTVSSASTKGPSVFPLAPSSKSTSGGTAALGCLVKDYFPEPVTVSWNSGALTSGVHTFPAVLQSSGLYSLSSVVTVPSSSLGTQTYICNVNHKPSNTKVDKKVEPKSCDKTHTCPPCPAPEAAGGPSVFLFPPKPKDTLMISRTPEVTCVVVDVSHEDPEVKFNWYVDGVEVHNAKTKPREEQYNSTYRVVSVLTVLHQDWLNGKEYKCKVSNKALPAPIEKTISKAKGQPREPQVYTLPPSRDELTKNQVSLWCLVKGFYPSDIAVEWESNGQPENNYKTTPPVLDSDGSFFLYSKLTVDKSRWQQGNVFSCSVLHEALHSHYTQKSLSLSPGK

SEQ ID NO: 771 - protein, 452 aa, Artificial Sequence
  Synthetic polypeptide
ELQLQESGPGLVKPSETLSLTCTVSGGSITASNTYWGWIRQPPGKGLEWIGSIDYTGSTYYNPSLKSRVTISVDTSKNQFSLKLSSVTAADTAVYYCATGKYYETYLGFDVWGQGTLVTVSSASTKGPSVFPLAPSSKSTSGGTAALGCLVKDYFPEPVTVSWNSGALTSGVHTFPAVLQSSGLYSLSSVVTVPSSSLGTQTYICNVNHKPSNTKVDKKVEPKSCDKTHTCPPCPAPEAAGGPSVFLFPPKPKDTLMISRTPEVTCVVVDVSHEDPEVKFNWYVDGVEVHNAKTKPREEQYNSTYRVVSVLTVLHQDWLNGKEYKCKVSNKALPAPIEKTISKAKGQPREPQVYTLPPSRDELTKNQVSLSCAVKGFYPSDIAVEWESNGQPENNYKTTPPVLDSDGSFFLVSKLTVDKSRWQQGNVFSCSVLHEALHSHYTQKSLSLSPGK

SEQ ID NO: 772 - protein, 452 aa, Artificial Sequence
  Synthetic polypeptide
ELQLQESGPGLVKPSETLSLTCTVSGGSITASNTYWGWIRQPPGKGLEWIGSIDYTGSTYYNPSLKSRVTISVDTSKNQFSLKLSSVTAADTAVYYCATGKYYETYLGFDVWGQGTLVTVSSASTKGPSVFPLAPSSKSTSGGTAALGCLVKDYFPEPVTVSWNSGALTSGVHTFPAVLQSSGLYSLSSVVTVPSSSLGTQTYICNVNHKPSNTKVDKKVEPKSCDKTHTCPPCPAPEAAGGPSVFLFPPKPKDTLYITREPEVTCVVVDVSHEDPEVKFNWYVDGVEVHNAKTKPREEQYNSTYRVVSVLTVLHQDWLNGKEYKCKVSNKALPAPIEKTISKAKGQPREPQVYTLPPCRDELTKNQVSLWCLVKGFYPSDIAVEWESNGQPENNYKTTPPVLDSDGSFFLYSKLTVDKSRWQQGNVFSCSVMHEALHNHYTQKSLSLSPGK

SEQ ID NO: 773 - protein, 452 aa, Artificial Sequence
  Synthetic polypeptide
ELQLQESGPGLVKPSETLSLTCTVSGGSITASNTYWGWIRQPPGKGLEWIGSIDYTGSTYYNPSLKSRVTISVDTSKNQFSLKLSSVTAADTAVYYCATGKYYETYLGFDVWGQGTLVTVSSASTKGPSVFPLAPSSKSTSGGTAALGCLVKDYFPEPVTVSWNSGALTSGVHTFPAVLQSSGLYSLSSVVTVPSSSLGTQTYICNVNHKPSNTKVDKKVEPKSCDKTHTCPPCPAPEAAGGPSVFLFPPKPKDTLYITREPEVTCVVVDVSHEDPEVKFNWYVDGVEVHNAKTKPREEQYNSTYRVVSVLTVLHQDWLNGKEYKCKVSNKALPAPIEKTISKAKGQPREPQVCTLPPSRDELTKNQVSLSCAVKGFYPSDIAVEWESNGQPENNYKTTPPVLDSDGSFFLVSKLTVDKSRWQQGNVFSCSVMHEALHNHYTQKSLSLSPGK

SEQ ID NO: 774 - protein, 452 aa, Artificial Sequence
  Synthetic polypeptide
ELQLQESGPGLVKPSETLSLTCTVSGGSITASNTYWGWIRQPPGKGLEWIGSIDYTGSTYYNPSLKSRVTISVDTSKNQFSLKLSSVTAADTAVYYCATGKYYETYLGFDVWGQGTLVTVSSASTKGPSVFPLAPSSKSTSGGTAALGCLVKDYFPEPVTVSWNSGALTSGVHTFPAVLQSSGLYSLSSVVTVPSSSLGTQTYICNVNHKPSNTKVDKKVEPKSCDKTHTCPPCPAPEAAGGPSVFLFPPKPKDTLYITREPEVTCVVVDVSHEDPEVKFNWYVDGVEVHNAKTKPREEQYNSTYRVVSVLTVLHQDWLNGKEYKCKVSNKALPAPIEKTISKAKGQPREPQVYTLPPSRDELTKNQVSLWCLVKGFYPSDIAVEWESNGQPENNYKTTPPVLDSDGSFFLYSKLTVDKSRWQQGNVFSCSVMHEALHNHYTQKSLSLSPGK

SEQ ID NO: 775 - protein, 452 aa, Artificial Sequence
  Synthetic polypeptide
ELQLQESGPGLVKPSETLSLTCTVSGGSITASNTYWGWIRQPPGKGLEWIGSIDYTGSTYYNPSLKSRVTISVDTSKNQFSLKLSSVTAADTAVYYCATGKYYETYLGFDVWGQGTLVTVSSASTKGPSVFPLAPSSKSTSGGTAALGCLVKDYFPEPVTVSWNSGALTSGVHTFPAVLQSSGLYSLSSVVTVPSSSLGTQTYICNVNHKPSNTKVDKKVEPKSCDKTHTCPPCPAPEAAGGPSVFLFPPKPKDTLYITREPEVTCVVVDVSHEDPEVKFNWYVDGVEVHNAKTKPREEQYNSTYRVVSVLTVLHQDWLNGKEYKCKVSNKALPAPIEKTISKAKGQPREPQVYTLPPSRDELTKNQVSLSCAVKGFYPSDIAVEWESNGQPENNYKTTPPVLDSDGSFFLVSKLTVDKSRWQQGNVFSCSVMHEALHNHYTQKSLSLSPGK

SEQ ID NO: 776 - protein, 452 aa, Artificial Sequence
  Synthetic polypeptide
ELQLQESGPGLVKPSETLSLTCTVSGGSITASNTYWGWIRQPPGKGLEWIGSIDYTGSTYYNPSLKSRVTISVDTSKNQFSLKLSSVTAADTAVYYCATGKYYETYLGFDVWGQGTLVTVSSASTKGPSVFPLAPSSKSTSGGTAALGCLVKDYFPEPVTVSWNSGALTSGVHTFPAVLQSSGLYSLSSVVTVPSSSLGTQTYICNVNHKPSNTKVDKKVEPKSCDKTHTCPPCPAPELLGGPSVFLFPPKPKDTLMISRTPEVTCVVVDVSHEDPEVKFNWYVDGVEVHNAKTKPREEQYGSTYRVVSVLTVLHQDWLNGKEYKCKVSNKALPAPIEKTISKAKGQPREPQVYTLPPCRDELTKNQVSLWCLVKGFYPSDIAVEWESNGQPENNYKTTPPVLDSDGSFFLYSKLTVDKSRWQQGNVFSCSVLHEALHSHYTQKSLSLSPGK

SEQ ID NO: 777 - protein, 452 aa, Artificial Sequence
  Synthetic polypeptide
ELQLQESGPGLVKPSETLSLTCTVSGGSITASNTYWGWIRQPPGKGLEWIGSIDYTGSTYYNPSLKSRVTISVDTSKNQFSLKLSSVTAADTAVYYCATGKYYETYLGFDVWGQGTLVTVSSASTKGPSVFPLAPSSKSTSGGTAALGCLVKDYFPEPVTVSWNSGALTSGVHTFPAVLQSSGLYSLSSVVTVPSSSLGTQTYICNVNHKPSNTKVDKKVEPKSCDKTHTCPPCPAPELLGGPSVFLFPPKPKDTLMISRTPEVTCVVVDVSHEDPEVKFNWYVDGVEVHNAKTKPREEQYGSTYRVVSVLTVLHQDWLNGKEYKCKVSNKALPAPIEKTISKAKGQPREPQVCTLPPSRDELTKNQVSLSCAVKGFYPSDIAVEWESNGQPENNYKTTPPVLDSDGSFFLVSKLTVDKSRWQQGNVFSCSVLHEALHSHYTQKSLSLSPGK

SEQ ID NO: 778 - protein, 452 aa, Artificial Sequence
  Synthetic polypeptide
ELQLQESGPGLVKPSETLSLTCTVSGGSITASNTYWGWIRQPPGKGLEWIGSIDYTGSTYYNPSLKSRVTISVDTSKNQFSLKLSSVTAADTAVYYCATGKYYETYLGFDVWGQGTLVTVSSASTKGPSVFPLAPSSKSTSGGTAALGCLVKDYFPEPVTVSWNSGALTSGVHTFPAVLQSSGLYSLSSVVTVPSSSLGTQTYICNVNHKPSNTKVDKKVEPKSCDKTHTCPPCPAPELLGGPSVFLFPPKPKDTLMISRTPEVTCVVVDVSHEDPEVKFNWYVDGVEVHNAKTKPREEQYGSTYRVVSVLTVLHQDWLNGKEYKCKVSNKALPAPIEKTISKAKGQPREPQVYTLPPSRDELTKNQVSLWCLVKGFYPSDIAVEWESNGQPENNYKTTPPVLDSDGSFFLYSKLTVDKSRWQQGNVFSCSVLHEALHSHYTQKSLSLSPGK

SEQ ID NO: 779 - protein, 452 aa, Artificial Sequence
  Synthetic polypeptide
ELQLQESGPGLVKPSETLSLTCTVSGGSITASNTYWGWIRQPPGKGLEWIGSIDYTGSTYYNPSLKSRVTISVDTSKNQFSLKLSSVTAADTAVYYCATGKYYETYLGFDVWGQGTLVTVSSASTKGPSVFPLAPSSKSTSGGTAALGCLVKDYFPEPVTVSWNSGALTSGVHTFPAVLQSSGLYSLSSVVTVPSSSLGTQTYICNVNHKPSNTKVDKKVEPKSCDKTHTCPPCPAPELLGGPSVFLFPPKPKDTLMISRTPEVTCVVVDVSHEDPEVKFNWYVDGVEVHNAKTKPREEQYGSTYRVVSVLTVLHQDWLNGKEYKCKVSNKALPAPIEKTISKAKGQPREPQVYTLPPSRDELTKNQVSLSCAVKGFYPSDIAVEWESNGQPENNYKTTPPVLDSDGSFFLVSKLTVDKSRWQQGNVFSCSVLHEALHSHYTQKSLSLSPGK

SEQ ID NO: 780 - protein, 452 aa, Artificial Sequence
  Synthetic polypeptide
ELQLQESGPGLVKPSETLSLTCTVSGGSITASNTYWGWIRQPPGKGLEWIGSIDYTGSTYYNPSLKSRVTISVDTSKNQFSLKLSSVTAADTAVYYCATGKYYETYLGFDVWGQGTLVTVSSASTKGPSVFPLAPSSKSTSGGTAALGCLVKDYFPEPVTVSWNSGALTSGVHTFPAVLQSSGLYSLSSVVTVPSSSLGTQTYICNVNHKPSNTKVDKKVEPKSCDKTHTCPPCPAPELLGGPSVFLFPPKPKDTLYITREPEVTCVVVDVSHEDPEVKFNWYVDGVEVHNAKTKPREEQYGSTYRVVSVLTVLHQDWLNGKEYKCKVSNKALPAPIEKTISKAKGQPREPQVYTLPPCRDELTKNQVSLWCLVKGFYPSDIAVEWESNGQPENNYKTTPPVLDSDGSFFLYSKLTVDKSRWQQGNVFSCSVMHEALHNHYTQKSLSLSPGK

SEQ ID NO: 781 - protein, 452 aa, Artificial Sequence
  Synthetic polypeptide
ELQLQESGPGLVKPSETLSLTCTVSGGSITASNTYWGWIRQPPGKGLEWIGSIDYTGSTYYNPSLKSRVTISVDTSKNQFSLKLSSVTAADTAVYYCATGKYYETYLGFDVWGQGTLVTVSSASTKGPSVFPLAPSSKSTSGGTAALGCLVKDYFPEPVTVSWNSGALTSGVHTFPAVLQSSGLYSLSSVVTVPSSSLGTQTYICNVNHKPSNTKVDKKVEPKSCDKTHTCPPCPAPELLGGPSVFLFPPKPKDTLYITREPEVTCVVVDVSHEDPEVKFNWYVDGVEVHNAKTKPREEQYGSTYRVVSVLTVLHQDWLNGKEYKCKVSNKALPAPIEKTISKAKGQPREPQVCTLPPSRDELTKNQVSLSCAVKGFYPSDIAVEWESNGQPENNYKTTPPVLDSDGSFFLVSKLTVDKSRWQQGNVFSCSVMHEALHNHYTQKSLSLSPGK

SEQ ID NO: 782 - protein, 452 aa, Artificial Sequence
  Synthetic polypeptide
QLQLQESGPGLVKPSETLSLTCTVSGGSITASNTYWGWIRQPPGKGLEWIGSIDYTGSTYYNPSLKSRVTISVDTSKNQFSLKLSSVTAADTAVYYCATGKYYETYLGFDVWGQGTLVTVSSASTKGPSVFPLAPSSKSTSGGTAALGCLVKDYFPEPVTVSWNSGALTSGVHTFPAVLQSSGLYSLSSVVTVPSSSLGTQTYICNVNHKPSNTKVDKKVEPKSCDKTHTCPPCPAPEAAGGPSVFLFPPKPKDTLMISRTPEVTCVVVDVSHEDPEVKFNWYVDGVEVHNAKTKPREEQYNSTYRVVSVLTVLHQDWLNGKEYKCKVSNKALPAPIEKTISKAKGQPREPQVYTLPPCRDELTKNQVSLWCLVKGFYPSDIAVEWESNGQPENNYKTTPPVLDSDGSFFLYSKLTVDKSRWQQGNVFSCSVMHEALHNHYTQKSLSLSPGK

SEQ ID NO: 783 - protein, 452 aa, Artificial Sequence
  Synthetic polypeptide
QLQLQESGPGLVKPSETLSLTCTVSGGSITASNTYWGWIRQPPGKGLEWIGSIDYTGSTYYNPSLKSRVTISVDTSKNQFSLKLSSVTAADTAVYYCATGKYYETYLGFDVWGQGTLVTVSSASTKGPSVFPLAPSSKSTSGGTAALGCLVKDYFPEPVTVSWNSGALTSGVHTFPAVLQSSGLYSLSSVVTVPSSSLGTQTYICNVNHKPSNTKVDKKVEPKSCDKTHTCPPCPAPEAAGGPSVFLFPPKPKDTLMISRTPEVTCVVVDVSHEDPEVKFNWYVDGVEVHNAKTKPREEQYNSTYRVVSVLTVLHQDWLNGKEYKCKVSNKALPAPIEKTISKAKGQPREPQVCTLPPSRDELTKNQVSLSCAVKGFYPSDIAVEWESNGQPENNYKTTPPVLDSDGSFFLVSKLTVDKSRWQQGNVFSCSVMHEALHNHYTQKSLSLSPGK

SEQ ID NO: 784 - protein, 452 aa, Artificial Sequence
  Synthetic polypeptide
QLQLQESGPGLVKPSETLSLTCTVSGGSITASNTYWGWIRQPPGKGLEWIGSIDYTGSTYYNPSLKSRVTISVDTSKNQFSLKLSSVTAADTAVYYCATGKYYETYLGFDVWGQGTLVTVSSASTKGPSVFPLAPSSKSTSGGTAALGCLVKDYFPEPVTVSWNSGALTSGVHTFPAVLQSSGLYSLSSVVTVPSSSLGTQTYICNVNHKPSNTKVDKKVEPKSCDKTHTCPPCPAPEAAGGPSVFLFPPKPKDTLMISRTPEVTCVVVDVSHEDPEVKFNWYVDGVEVHNAKTKPREEQYNSTYRVVSVLTVLHQDWLNGKEYKCKVSNKALPAPIEKTISKAKGQPREPQVYTLPPSRDELTKNQVSLWCLVKGFYPSDIAVEWESNGQPENNYKTTPPVLDSDGSFFLYSKLTVDKSRWQQGNVFSCSVMHEALHNHYTQKSLSLSPGK

SEQ ID NO: 785 - protein, 452 aa, Artificial Sequence
  Synthetic polypeptide
QLQLQESGPGLVKPSETLSLTCTVSGGSITASNTYWGWIRQPPGKGLEWIGSIDYTGSTYYNPSLKSRVTISVDTSKNQFSLKLSSVTAADTAVYYCATGKYYETYLGFDVWGQGTLVTVSSASTKGPSVFPLAPSSKSTSGGTAALGCLVKDYFPEPVTVSWNSGALTSGVHTFPAVLQSSGLYSLSSVVTVPSSSLGTQTYICNVNHKPSNTKVDKKVEPKSCDKTHTCPPCPAPEAAGGPSVFLFPPKPKDTLMISRTPEVTCVVVDVSHEDPEVKFNWYVDGVEVHNAKTKPREEQYNSTYRVVSVLTVLHQDWLNGKEYKCKVSNKALPAPIEKTISKAKGQPREPQVYTLPPSRDELTKNQVSLSCAVKGFYPSDIAVEWESNGQPENNYKTTPPVLDSDGSFFLVSKLTVDKSRWQQGNVFSCSVMHEALHNHYTQKSLSLSPGK

SEQ ID NO: 786 - protein, 452 aa, Artificial Sequence
  Synthetic polypeptide
ELQLQESGPGLVKPSETLSLTCTVSGGSITASNTYWGWIRQPPGKGLEWIGSIDYTGSTYYNPSLKSRVTISVDTSKNQFSLKLSSVTAADTAVYYCATGKYYETYLGFDVWGQGTLVTVSSASTKGPSVFPLAPSSKSTSGGTAALGCLVKDYFPEPVTVSWNSGALTSGVHTFPAVLQSSGLYSLSSVVTVPSSSLGTQTYICNVNHKPSNTKVDKKVEPKSCDKTHTCPPCPAPEAAGGPSVFLFPPKPKDTLMISRTPEVTCVVVDVSHEDPEVKFNWYVDGVEVHNAKTKPREEQYNSTYRVVSVLTVLHQDWLNGKEYKCKVSNKALPAPIEKTISKAKGQPREPQVYTLPPCRDELTKNQVSLWCLVKGFYPSDIAVEWESNGQPENNYKTTPPVLDSDGSFFLYSKLTVDKSRWQQGNVFSCSVMHEALHNHYTQKSLSLSPGK

SEQ ID NO: 787 - protein, 452 aa, Artificial Sequence
  Synthetic polypeptide
ELQLQESGPGLVKPSETLSLTCTVSGGSITASNTYWGWIRQPPGKGLEWIGSIDYTGSTYYNPSLKSRVTISVDTSKNQFSLKLSSVTAADTAVYYCATGKYYETYLGFDVWGQGTLVTVSSASTKGPSVFPLAPSSKSTSGGTAALGCLVKDYFPEPVTVSWNSGALTSGVHTFPAVLQSSGLYSLSSVVTVPSSSLGTQTYICNVNHKPSNTKVDKKVEPKSCDKTHTCPPCPAPEAAGGPSVFLFPPKPKDTLMISRTPEVTCVVVDVSHEDPEVKFNWYVDGVEVHNAKTKPREEQYNSTYRVVSVLTVLHQDWLNGKEYKCKVSNKALPAPIEKTISKAKGQPREPQVCTLPPSRDELTKNQVSLSCAVKGFYPSDIAVEWESNGQPENNYKTTPPVLDSDGSFFLVSKLTVDKSRWQQGNVFSCSVMHEALHNHYTQKSLSLSPGK

SEQ ID NO: 788 - protein, 452 aa, Artificial Sequence
  Synthetic polypeptide
ELQLQESGPGLVKPSETLSLTCTVSGGSITASNTYWGWIRQPPGKGLEWIGSIDYTGSTYYNPSLKSRVTISVDTSKNQFSLKLSSVTAADTAVYYCATGKYYETYLGFDVWGQGTLVTVSSASTKGPSVFPLAPSSKSTSGGTAALGCLVKDYFPEPVTVSWNSGALTSGVHTFPAVLQSSGLYSLSSVVTVPSSSLGTQTYICNVNHKPSNTKVDKKVEPKSCDKTHTCPPCPAPEAAGGPSVFLFPPKPKDTLMISRTPEVTCVVVDVSHEDPEVKFNWYVDGVEVHNAKTKPREEQYNSTYRVVSVLTVLHQDWLNGKEYKCKVSNKALPAPIEKTISKAKGQPREPQVYTLPPSRDELTKNQVSLWCLVKGFYPSDIAVEWESNGQPENNYKTTPPVLDSDGSFFLYSKLTVDKSRWQQGNVFSCSVMHEALHNHYTQKSLSLSPGK

SEQ ID NO: 789 - protein, 452 aa, Artificial Sequence
  Synthetic polypeptide
ELQLQESGPGLVKPSETLSLTCTVSGGSITASNTYWGWIRQPPGKGLEWIGSIDYTGSTYYNPSLKSRVTISVDTSKNQFSLKLSSVTAADTAVYYCATGKYYETYLGFDVWGQGTLVTVSSASTKGPSVFPLAPSSKSTSGGTAALGCLVKDYFPEPVTVSWNSGALTSGVHTFPAVLQSSGLYSLSSVVTVPSSSLGTQTYICNVNHKPSNTKVDKKVEPKSCDKTHTCPPCPAPEAAGGPSVFLFPPKPKDTLMISRTPEVTCVVVDVSHEDPEVKFNWYVDGVEVHNAKTKPREEQYNSTYRVVSVLTVLHQDWLNGKEYKCKVSNKALPAPIEKTISKAKGQPREPQVYTLPPSRDELTKNQVSLSCAVKGFYPSDIAVEWESNGQPENNYKTTPPVLDSDGSFFLVSKLTVDKSRWQQGNVFSCSVMHEALHNHYTQKSLSLSPGK

SEQ ID NO: 790 - protein, 453 aa, Artificial Sequence
  Synthetic polypeptide
QLQLQESGPGLVKPSETLSLTCTVSGGSISDSSYYWGWIRQPPGKGLEWIGSIYYTGETYYAPSLKSRVTISVDTSKNQFSLKLSSVTAADTAVYYCARVRYGVGVPRHFDPWGQGTLVTVSSASTKGPSVFPLAPSSKSTSGGTAALGCLVKDYFPEPVTVSWNSGALTSGVHTFPAVLQSSGLYSLSSVVTVPSSSLGTQTYICNVNHKPSNTKVDKKVEPKSCDKTHTCPPCPAPEAAGGPSVFLFPPKPKDTLMISRTPEVTCVVVDVSHEDPEVKFNWYVDGVEVHNAKTKPREEQYNSTYRVVSVLTVLHQDWLNGKEYKCKVSNKALPAPIEKTISKAKGQPREPQVYTLPPCRDELTKNQVSLWCLVKGFYPSDIAVEWESNGQPENNYKTTPPVLDSDGSFFLYSKLTVDKSRWQQGNVFSCSVLHEALHSHYTQKSLSLSPGK

SEQ ID NO: 791 - protein, 453 aa, Artificial Sequence
  Synthetic polypeptide
QLQLQESGPGLVKPSETLSLTCTVSGGSISDSSYYWGWIRQPPGKGLEWIGSIYYTGETYYAPSLKSRVTISVDTSKNQFSLKLSSVTAADTAVYYCARVRYGVGVPRHFDPWGQGTLVTVSSASTKGPSVFPLAPSSKSTSGGTAALGCLVKDYFPEPVTVSWNSGALTSGVHTFPAVLQSSGLYSLSSVVTVPSSSLGTQTYICNVNHKPSNTKVDKKVEPKSCDKTHTCPPCPAPEAAGGPSVFLFPPKPKDTLMISRTPEVTCVVVDVSHEDPEVKFNWYVDGVEVHNAKTKPREEQYNSTYRVVSVLTVLHQDWLNGKEYKCKVSNKALPAPIEKTISKAKGQPREPQVCTLPPSRDELTKNQVSLSCAVKGFYPSDIAVEWESNGQPENNYKTTPPVLDSDGSFFLVSKLTVDKSRWQQGNVFSCSVLHEALHSHYTQKSLSLSPGK

SEQ ID NO: 792 - protein, 453 aa, Artificial Sequence
  Synthetic polypeptide
QLQLQESGPGLVKPSETLSLTCTVSGGSISDSSYYWGWIRQPPGKGLEWIGSIYYTGETYYAPSLKSRVTISVDTSKNQFSLKLSSVTAADTAVYYCARVRYGVGVPRHFDPWGQGTLVTVSSASTKGPSVFPLAPSSKSTSGGTAALGCLVKDYFPEPVTVSWNSGALTSGVHTFPAVLQSSGLYSLSSVVTVPSSSLGTQTYICNVNHKPSNTKVDKKVEPKSCDKTHTCPPCPAPEAAGGPSVFLFPPKPKDTLMISRTPEVTCVVVDVSHEDPEVKFNWYVDGVEVHNAKTKPREEQYNSTYRVVSVLTVLHQDWLNGKEYKCKVSNKALPAPIEKTISKAKGQPREPQVYTLPPSRDELTKNQVSLWCLVKGFYPSDIAVEWESNGQPENNYKTTPPVLDSDGSFFLYSKLTVDKSRWQQGNVFSCSVLHEALHSHYTQKSLSLSPGK

SEQ ID NO: 793 - protein, 453 aa, Artificial Sequence
  Synthetic polypeptide
QLQLQESGPGLVKPSETLSLTCTVSGGSISDSSYYWGWIRQPPGKGLEWIGSIYYTGETYYAPSLKSRVTISVDTSKNQFSLKLSSVTAADTAVYYCARVRYGVGVPRHFDPWGQGTLVTVSSASTKGPSVFPLAPSSKSTSGGTAALGCLVKDYFPEPVTVSWNSGALTSGVHTFPAVLQSSGLYSLSSVVTVPSSSLGTQTYICNVNHKPSNTKVDKKVEPKSCDKTHTCPPCPAPEAAGGPSVFLFPPKPKDTLMISRTPEVTCVVVDVSHEDPEVKFNWYVDGVEVHNAKTKPREEQYNSTYRVVSVLTVLHQDWLNGKEYKCKVSNKALPAPIEKTISKAKGQPREPQVYTLPPSRDELTKNQVSLSCAVKGFYPSDIAVEWESNGQPENNYKTTPPVLDSDGSFFLVSKLTVDKSRWQQGNVFSCSVLHEALHSHYTQKSLSLSPGK

SEQ ID NO: 794 - protein, 453 aa, Artificial Sequence
  Synthetic polypeptide
QLQLQESGPGLVKPSETLSLTCTVSGGSISDSSYYWGWIRQPPGKGLEWIGSIYYTGETYYAPSLKSRVTISVDTSKNQFSLKLSSVTAADTAVYYCARVRYGVGVPRHFDPWGQGTLVTVSSASTKGPSVFPLAPSSKSTSGGTAALGCLVKDYFPEPVTVSWNSGALTSGVHTFPAVLQSSGLYSLSSVVTVPSSSLGTQTYICNVNHKPSNTKVDKKVEPKSCDKTHTCPPCPAPEAAGGPSVFLFPPKPKDTLYITREPEVTCVVVDVSHEDPEVKFNWYVDGVEVHNAKTKPREEQYNSTYRVVSVLTVLHQDWLNGKEYKCKVSNKALPAPIEKTISKAKGQPREPQVYTLPPCRDELTKNQVSLWCLVKGFYPSDIAVEWESNGQPENNYKTTPPVLDSDGSFFLYSKLTVDKSRWQQGNVFSCSVMHEALHNHYTQKSLSLSPGK

SEQ ID NO: 795 - protein, 453 aa, Artificial Sequence
  Synthetic polypeptide
QLQLQESGPGLVKPSETLSLTCTVSGGSISDSSYYWGWIRQPPGKGLEWIGSIYYTGETYYAPSLKSRVTISVDTSKNQFSLKLSSVTAADTAVYYCARVRYGVGVPRHFDPWGQGTLVTVSSASTKGPSVFPLAPSSKSTSGGTAALGCLVKDYFPEPVTVSWNSGALTSGVHTFPAVLQSSGLYSLSSVVTVPSSSLGTQTYICNVNHKPSNTKVDKKVEPKSCDKTHTCPPCPAPEAAGGPSVFLFPPKPKDTLYITREPEVTCVVVDVSHEDPEVKFNWYVDGVEVHNAKTKPREEQYNSTYRVVSVLTVLHQDWLNGKEYKCKVSNKALPAPIEKTISKAKGQPREPQVCTLPPSRDELTKNQVSLSCAVKGFYPSDIAVEWESNGQPENNYKTTPPVLDSDGSFFLVSKLTVDKSRWQQGNVFSCSVMHEALHNHYTQKSLSLSPGK

SEQ ID NO: 796 - protein, 453 aa, Artificial Sequence
  Synthetic polypeptide
QLQLQESGPGLVKPSETLSLTCTVSGGSISDSSYYWGWIRQPPGKGLEWIGSIYYTGETYYAPSLKSRVTISVDTSKNQFSLKLSSVTAADTAVYYCARVRYGVGVPRHFDPWGQGTLVTVSSASTKGPSVFPLAPSSKSTSGGTAALGCLVKDYFPEPVTVSWNSGALTSGVHTFPAVLQSSGLYSLSSVVTVPSSSLGTQTYICNVNHKPSNTKVDKKVEPKSCDKTHTCPPCPAPEAAGGPSVFLFPPKPKDTLYITREPEVTCVVVDVSHEDPEVKFNWYVDGVEVHNAKTKPREEQYNSTYRVVSVLTVLHQDWLNGKEYKCKVSNKALPAPIEKTISKAKGQPREPQVYTLPPSRDELTKNQVSLWCLVKGFYPSDIAVEWESNGQPENNYKTTPPVLDSDGSFFLYSKLTVDKSRWQQGNVFSCSVMHEALHNHYTQKSLSLSPGK

SEQ ID NO: 797 - protein, 453 aa, Artificial Sequence
  Synthetic polypeptide
QLQLQESGPGLVKPSETLSLTCTVSGGSISDSSYYWGWIRQPPGKGLEWIGSIYYTGETYYAPSLKSRVTISVDTSKNQFSLKLSSVTAADTAVYYCARVRYGVGVPRHFDPWGQGTLVTVSSASTKGPSVFPLAPSSKSTSGGTAALGCLVKDYFPEPVTVSWNSGALTSGVHTFPAVLQSSGLYSLSSVVTVPSSSLGTQTYICNVNHKPSNTKVDKKVEPKSCDKTHTCPPCPAPEAAGGPSVFLFPPKPKDTLYITREPEVTCVVVDVSHEDPEVKFNWYVDGVEVHNAKTKPREEQYNSTYRVVSVLTVLHQDWLNGKEYKCKVSNKALPAPIEKTISKAKGQPREPQVYTLPPSRDELTKNQVSLSCAVKGFYPSDIAVEWESNGQPENNYKTTPPVLDSDGSFFLVSKLTVDKSRWQQGNVFSCSVMHEALHNHYTQKSLSLSPGK

SEQ ID NO: 798 - protein, 453 aa, Artificial Sequence
  Synthetic polypeptide
QLQLQESGPGLVKPSETLSLTCTVSGGSISDSSYYWGWIRQPPGKGLEWIGSIYYTGETYYAPSLKSRVTISVDTSKNQFSLKLSSVTAADTAVYYCARVRYGVGVPRHFDPWGQGTLVTVSSASTKGPSVFPLAPSSKSTSGGTAALGCLVKDYFPEPVTVSWNSGALTSGVHTFPAVLQSSGLYSLSSVVTVPSSSLGTQTYICNVNHKPSNTKVDKKVEPKSCDKTHTCPPCPAPELLGGPSVFLFPPKPKDTLMISRTPEVTCVVVDVSHEDPEVKFNWYVDGVEVHNAKTKPREEQYGSTYRVVSVLTVLHQDWLNGKEYKCKVSNKALPAPIEKTISKAKGQPREPQVYTLPPCRDELTKNQVSLWCLVKGFYPSDIAVEWESNGQPENNYKTTPPVLDSDGSFFLYSKLTVDKSRWQQGNVFSCSVLHEALHSHYTQKSLSLSPGK

SEQ ID NO: 799 - protein, 453 aa, Artificial Sequence
  Synthetic polypeptide
QLQLQESGPGLVKPSETLSLTCTVSGGSISDSSYYWGWIRQPPGKGLEWIGSIYYTGETYYAPSLKSRVTISVDTSKNQFSLKLSSVTAADTAVYYCARVRYGVGVPRHFDPWGQGTLVTVSSASTKGPSVFPLAPSSKSTSGGTAALGCLVKDYFPEPVTVSWNSGALTSGVHTFPAVLQSSGLYSLSSVVTVPSSSLGTQTYICNVNHKPSNTKVDKKVEPKSCDKTHTCPPCPAPELLGGPSVFLFPPKPKDTLMISRTPEVTCVVVDVSHEDPEVKFNWYVDGVEVHNAKTKPREEQYGSTYRVVSVLTVLHQDWLNGKEYKCKVSNKALPAPIEKTISKAKGQPREPQVCTLPPSRDELTKNQVSLSCAVKGFYPSDIAVEWESNGQPENNYKTTPPVLDSDGSFFLVSKLTVDKSRWQQGNVFSCSVLHEALHSHYTQKSLSLSPGK

SEQ ID NO: 800 - protein, 453 aa, Artificial Sequence
  Synthetic polypeptide
QLQLQESGPGLVKPSETLSLTCTVSGGSISDSSYYWGWIRQPPGKGLEWIGSIYYTGETYYAPSLKSRVTISVDTSKNQFSLKLSSVTAADTAVYYCARVRYGVGVPRHFDPWGQGTLVTVSSASTKGPSVFPLAPSSKSTSGGTAALGCLVKDYFPEPVTVSWNSGALTSGVHTFPAVLQSSGLYSLSSVVTVPSSSLGTQTYICNVNHKPSNTKVDKKVEPKSCDKTHTCPPCPAPELLGGPSVFLFPPKPKDTLMISRTPEVTCVVVDVSHEDPEVKFNWYVDGVEVHNAKTKPREEQYGSTYRVVSVLTVLHQDWLNGKEYKCKVSNKALPAPIEKTISKAKGQPREPQVYTLPPSRDELTKNQVSLWCLVKGFYPSDIAVEWESNGQPENNYKTTPPVLDSDGSFFLYSKLTVDKSRWQQGNVFSCSVLHEALHSHYTQKSLSLSPGK

SEQ ID NO: 801 - protein, 453 aa, Artificial Sequence
  Synthetic polypeptide
QLQLQESGPGLVKPSETLSLTCTVSGGSISDSSYYWGWIRQPPGKGLEWIGSIYYTGETYYAPSLKSRVTISVDTSKNQFSLKLSSVTAADTAVYYCARVRYGVGVPRHFDPWGQGTLVTVSSASTKGPSVFPLAPSSKSTSGGTAALGCLVKDYFPEPVTVSWNSGALTSGVHTFPAVLQSSGLYSLSSVVTVPSSSLGTQTYICNVNHKPSNTKVDKKVEPKSCDKTHTCPPCPAPELLGGPSVFLFPPKPKDTLMISRTPEVTCVVVDVSHEDPEVKFNWYVDGVEVHNAKTKPREEQYGSTYRVVSVLTVLHQDWLNGKEYKCKVSNKALPAPIEKTISKAKGQPREPQVYTLPPSRDELTKNQVSLSCAVKGFYPSDIAVEWESNGQPENNYKTTPPVLDSDGSFFLVSKLTVDKSRWQQGNVFSCSVLHEALHSHYTQKSLSLSPGK

SEQ ID NO: 802 - protein, 453 aa, Artificial Sequence
  Synthetic polypeptide
QLQLQESGPGLVKPSETLSLTCTVSGGSISDSSYYWGWIRQPPGKGLEWIGSIYYTGETYYAPSLKSRVTISVDTSKNQFSLKLSSVTAADTAVYYCARVRYGVGVPRHFDPWGQGTLVTVSSASTKGPSVFPLAPSSKSTSGGTAALGCLVKDYFPEPVTVSWNSGALTSGVHTFPAVLQSSGLYSLSSVVTVPSSSLGTQTYICNVNHKPSNTKVDKKVEPKSCDKTHTCPPCPAPELLGGPSVFLFPPKPKDTLYITREPEVTCVVVDVSHEDPEVKFNWYVDGVEVHNAKTKPREEQYGSTYRVVSVLTVLHQDWLNGKEYKCKVSNKALPAPIEKTISKAKGQPREPQVYTLPPCRDELTKNQVSLWCLVKGFYPSDIAVEWESNGQPENNYKTTPPVLDSDGSFFLYSKLTVDKSRWQQGNVFSCSVMHEALHNHYTQKSLSLSPGK

SEQ ID NO: 803 - protein, 453 aa, Artificial Sequence
  Synthetic polypeptide
QLQLQESGPGLVKPSETLSLTCTVSGGSISDSSYYWGWIRQPPGKGLEWIGSIYYTGETYYAPSLKSRVTISVDTSKNQFSLKLSSVTAADTAVYYCARVRYGVGVPRHFDPWGQGTLVTVSSASTKGPSVFPLAPSSKSTSGGTAALGCLVKDYFPEPVTVSWNSGALTSGVHTFPAVLQSSGLYSLSSVVTVPSSSLGTQTYICNVNHKPSNTKVDKKVEPKSCDKTHTCPPCPAPELLGGPSVFLFPPKPKDTLYITREPEVTCVVVDVSHEDPEVKFNWYVDGVEVHNAKTKPREEQYGSTYRVVSVLTVLHQDWLNGKEYKCKVSNKALPAPIEKTISKAKGQPREPQVCTLPPSRDELTKNQVSLSCAVKGFYPSDIAVEWESNGQPENNYKTTPPVLDSDGSFFLVSKLTVDKSRWQQGNVFSCSVMHEALHNHYTQKSLSLSPGK

SEQ ID NO: 804 - protein, 453 aa, Artificial Sequence
  Synthetic polypeptide
QLQLQESGPGLVKPSETLSLTCTVSGGSISDSSYYWGWIRQPPGKGLEWIGSIYYTGETYYAPSLKSRVTISVDTSKNQFSLKLSSVTAADTAVYYCARVRYGVGVPRHFDPWGQGTLVTVSSASTKGPSVFPLAPSSKSTSGGTAALGCLVKDYFPEPVTVSWNSGALTSGVHTFPAVLQSSGLYSLSSVVTVPSSSLGTQTYICNVNHKPSNTKVDKKVEPKSCDKTHTCPPCPAPELLGGPSVFLFPPKPKDTLYITREPEVTCVVVDVSHEDPEVKFNWYVDGVEVHNAKTKPREEQYGSTYRVVSVLTVLHQDWLNGKEYKCKVSNKALPAPIEKTISKAKGQPREPQVYTLPPSRDELTKNQVSLWCLVKGFYPSDIAVEWESNGQPENNYKTTPPVLDSDGSFFLYSKLTVDKSRWQQGNVFSCSVMHEALHNHYTQKSLSLSPGK

SEQ ID NO: 805 - protein, 453 aa, Artificial Sequence
  Synthetic polypeptide
QLQLQESGPGLVKPSETLSLTCTVSGGSISDSSYYWGWIRQPPGKGLEWIGSIYYTGETYYAPSLKSRVTISVDTSKNQFSLKLSSVTAADTAVYYCARVRYGVGVPRHFDPWGQGTLVTVSSASTKGPSVFPLAPSSKSTSGGTAALGCLVKDYFPEPVTVSWNSGALTSGVHTFPAVLQSSGLYSLSSVVTVPSSSLGTQTYICNVNHKPSNTKVDKKVEPKSCDKTHTCPPCPAPELLGGPSVFLFPPKPKDTLYITREPEVTCVVVDVSHEDPEVKFNWYVDGVEVHNAKTKPREEQYGSTYRVVSVLTVLHQDWLNGKEYKCKVSNKALPAPIEKTISKAKGQPREPQVYTLPPSRDELTKNQVSLSCAVKGFYPSDIAVEWESNGQPENNYKTTPPVLDSDGSFFLVSKLTVDKSRWQQGNVFSCSVMHEALHNHYTQKSLSLSPGK

SEQ ID NO: 806 - protein, 453 aa, Artificial Sequence
  Synthetic polypeptide
ELQLQESGPGLVKPSETLSLTCTVSGGSISDSSYYWGWIRQPPGKGLEWIGSIYYTGETYYAPSLKSRVTISVDTSKNQFSLKLSSVTAADTAVYYCARVRYGVGVPRHFDPWGQGTLVTVSSASTKGPSVFPLAPSSKSTSGGTAALGCLVKDYFPEPVTVSWNSGALTSGVHTFPAVLQSSGLYSLSSVVTVPSSSLGTQTYICNVNHKPSNTKVDKKVEPKSCDKTHTCPPCPAPEAAGGPSVFLFPPKPKDTLMISRTPEVTCVVVDVSHEDPEVKFNWYVDGVEVHNAKTKPREEQYNSTYRVVSVLTVLHQDWLNGKEYKCKVSNKALPAPIEKTISKAKGQPREPQVYTLPPCRDELTKNQVSLWCLVKGFYPSDIAVEWESNGQPENNYKTTPPVLDSDGSFFLYSKLTVDKSRWQQGNVFSCSVLHEALHSHYTQKSLSLSPGK

SEQ ID NO: 807 - protein, 453 aa, Artificial Sequence
  Synthetic polypeptide
ELQLQESGPGLVKPSETLSLTCTVSGGSISDSSYYWGWIRQPPGKGLEWIGSIYYTGETYYAPSLKSRVTISVDTSKNQFSLKLSSVTAADTAVYYCARVRYGVGVPRHFDPWGQGTLVTVSSASTKGPSVFPLAPSSKSTSGGTAALGCLVKDYFPEPVTVSWNSGALTSGVHTFPAVLQSSGLYSLSSVVTVPSSSLGTQTYICNVNHKPSNTKVDKKVEPKSCDKTHTCPPCPAPEAAGGPSVFLFPPKPKDTLMISRTPEVTCVVVDVSHEDPEVKFNWYVDGVEVHNAKTKPREEQYNSTYRVVSVLTVLHQDWLNGKEYKCKVSNKALPAPIEKTISKAKGQPREPQVCTLPPSRDELTKNQVSLSCAVKGFYPSDIAVEWESNGQPENNYKTTPPVLDSDGSFFLVSKLTVDKSRWQQGNVFSCSVLHEALHSHYTQKSLSLSPGK

SEQ ID NO: 808 - protein, 453 aa, Artificial Sequence
  Synthetic polypeptide
ELQLQESGPGLVKPSETLSLTCTVSGGSISDSSYYWGWIRQPPGKGLEWIGSIYYTGETYYAPSLKSRVTISVDTSKNQFSLKLSSVTAADTAVYYCARVRYGVGVPRHFDPWGQGTLVTVSSASTKGPSVFPLAPSSKSTSGGTAALGCLVKDYFPEPVTVSWNSGALTSGVHTFPAVLQSSGLYSLSSVVTVPSSSLGTQTYICNVNHKPSNTKVDKKVEPKSCDKTHTCPPCPAPEAAGGPSVFLFPPKPKDTLMISRTPEVTCVVVDVSHEDPEVKFNWYVDGVEVHNAKTKPREEQYNSTYRVVSVLTVLHQDWLNGKEYKCKVSNKALPAPIEKTISKAKGQPREPQVYTLPPSRDELTKNQVSLWCLVKGFYPSDIAVEWESNGQPENNYKTTPPVLDSDGSFFLYSKLTVDKSRWQQGNVFSCSVLHEALHSHYTQKSLSLSPGK

SEQ ID NO: 809 - protein, 453 aa, Artificial Sequence
  Synthetic polypeptide
ELQLQESGPGLVKPSETLSLTCTVSGGSISDSSYYWGWIRQPPGKGLEWIGSIYYTGETYYAPSLKSRVTISVDTSKNQFSLKLSSVTAADTAVYYCARVRYGVGVPRHFDPWGQGTLVTVSSASTKGPSVFPLAPSSKSTSGGTAALGCLVKDYFPEPVTVSWNSGALTSGVHTFPAVLQSSGLYSLSSVVTVPSSSLGTQTYICNVNHKPSNTKVDKKVEPKSCDKTHTCPPCPAPEAAGGPSVFLFPPKPKDTLMISRTPEVTCVVVDVSHEDPEVKFNWYVDGVEVHNAKTKPREEQYNSTYRVVSVLTVLHQDWLNGKEYKCKVSNKALPAPIEKTISKAKGQPREPQVYTLPPSRDELTKNQVSLSCAVKGFYPSDIAVEWESNGQPENNYKTTPPVLDSDGSFFLVSKLTVDKSRWQQGNVFSCSVLHEALHSHYTQKSLSLSPGK

SEQ ID NO: 810 - protein, 453 aa, Artificial Sequence
  Synthetic polypeptide
ELQLQESGPGLVKPSETLSLTCTVSGGSISDSSYYWGWIRQPPGKGLEWIGSIYYTGETYYAPSLKSRVTISVDTSKNQFSLKLSSVTAADTAVYYCARVRYGVGVPRHFDPWGQGTLVTVSSASTKGPSVFPLAPSSKSTSGGTAALGCLVKDYFPEPVTVSWNSGALTSGVHTFPAVLQSSGLYSLSSVVTVPSSSLGTQTYICNVNHKPSNTKVDKKVEPKSCDKTHTCPPCPAPEAAGGPSVFLFPPKPKDTLYITREPEVTCVVVDVSHEDPEVKFNWYVDGVEVHNAKTKPREEQYNSTYRVVSVLTVLHQDWLNGKEYKCKVSNKALPAPIEKTISKAKGQPREPQVYTLPPCRDELTKNQVSLWCLVKGFYPSDIAVEWESNGQPENNYKTTPPVLDSDGSFFLYSKLTVDKSRWQQGNVFSCSVMHEALHNHYTQKSLSLSPGK

SEQ ID NO: 811 - protein, 453 aa, Artificial Sequence
  Synthetic polypeptide
ELQLQESGPGLVKPSETLSLTCTVSGGSISDSSYYWGWIRQPPGKGLEWIGSIYYTGETYYAPSLKSRVTISVDTSKNQFSLKLSSVTAADTAVYYCARVRYGVGVPRHFDPWGQGTLVTVSSASTKGPSVFPLAPSSKSTSGGTAALGCLVKDYFPEPVTVSWNSGALTSGVHTFPAVLQSSGLYSLSSVVTVPSSSLGTQTYICNVNHKPSNTKVDKKVEPKSCDKTHTCPPCPAPEAAGGPSVFLFPPKPKDTLYITREPEVTCVVVDVSHEDPEVKFNWYVDGVEVHNAKTKPREEQYNSTYRVVSVLTVLHQDWLNGKEYKCKVSNKALPAPIEKTISKAKGQPREPQVCTLPPSRDELTKNQVSLSCAVKGFYPSDIAVEWESNGQPENNYKTTPPVLDSDGSFFLVSKLTVDKSRWQQGNVFSCSVMHEALHNHYTQKSLSLSPGK

SEQ ID NO: 812 - protein, 453 aa, Artificial Sequence
  Synthetic polypeptide
ELQLQESGPGLVKPSETLSLTCTVSGGSISDSSYYWGWIRQPPGKGLEWIGSIYYTGETYYAPSLKSRVTISVDTSKNQFSLKLSSVTAADTAVYYCARVRYGVGVPRHFDPWGQGTLVTVSSASTKGPSVFPLAPSSKSTSGGTAALGCLVKDYFPEPVTVSWNSGALTSGVHTFPAVLQSSGLYSLSSVVTVPSSSLGTQTYICNVNHKPSNTKVDKKVEPKSCDKTHTCPPCPAPEAAGGPSVFLFPPKPKDTLYITREPEVTCVVVDVSHEDPEVKFNWYVDGVEVHNAKTKPREEQYNSTYRVVSVLTVLHQDWLNGKEYKCKVSNKALPAPIEKTISKAKGQPREPQVYTLPPSRDELTKNQVSLWCLVKGFYPSDIAVEWESNGQPENNYKTTPPVLDSDGSFFLYSKLTVDKSRWQQGNVFSCSVMHEALHNHYTQKSLSLSPGK

SEQ ID NO: 813 - protein, 453 aa, Artificial Sequence
  Synthetic polypeptide
ELQLQESGPGLVKPSETLSLTCTVSGGSISDSSYYWGWIRQPPGKGLEWIGSIYYTGETYYAPSLKSRVTISVDTSKNQFSLKLSSVTAADTAVYYCARVRYGVGVPRHFDPWGQGTLVTVSSASTKGPSVFPLAPSSKSTSGGTAALGCLVKDYFPEPVTVSWNSGALTSGVHTFPAVLQSSGLYSLSSVVTVPSSSLGTQTYICNVNHKPSNTKVDKKVEPKSCDKTHTCPPCPAPEAAGGPSVFLFPPKPKDTLYITREPEVTCVVVDVSHEDPEVKFNWYVDGVEVHNAKTKPREEQYNSTYRVVSVLTVLHQDWLNGKEYKCKVSNKALPAPIEKTISKAKGQPREPQVYTLPPSRDELTKNQVSLSCAVKGFYPSDIAVEWESNGQPENNYKTTPPVLDSDGSFFLVSKLTVDKSRWQQGNVFSCSVMHEALHNHYTQKSLSLSPGK

SEQ ID NO: 814 - protein, 453 aa, Artificial Sequence
  Synthetic polypeptide
ELQLQESGPGLVKPSETLSLTCTVSGGSISDSSYYWGWIRQPPGKGLEWIGSIYYTGETYYAPSLKSRVTISVDTSKNQFSLKLSSVTAADTAVYYCARVRYGVGVPRHFDPWGQGTLVTVSSASTKGPSVFPLAPSSKSTSGGTAALGCLVKDYFPEPVTVSWNSGALTSGVHTFPAVLQSSGLYSLSSVVTVPSSSLGTQTYICNVNHKPSNTKVDKKVEPKSCDKTHTCPPCPAPELLGGPSVFLFPPKPKDTLMISRTPEVTCVVVDVSHEDPEVKFNWYVDGVEVHNAKTKPREEQYGSTYRVVSVLTVLHQDWLNGKEYKCKVSNKALPAPIEKTISKAKGQPREPQVYTLPPCRDELTKNQVSLWCLVKGFYPSDIAVEWESNGQPENNYKTTPPVLDSDGSFFLYSKLTVDKSRWQQGNVFSCSVLHEALHSHYTQKSLSLSPGK

SEQ ID NO: 815 - protein, 453 aa, Artificial Sequence
  Synthetic polypeptide
ELQLQESGPGLVKPSETLSLTCTVSGGSISDSSYYWGWIRQPPGKGLEWIGSIYYTGETYYAPSLKSRVTISVDTSKNQFSLKLSSVTAADTAVYYCARVRYGVGVPRHFDPWGQGTLVTVSSASTKGPSVFPLAPSSKSTSGGTAALGCLVKDYFPEPVTVSWNSGALTSGVHTFPAVLQSSGLYSLSSVVTVPSSSLGTQTYICNVNHKPSNTKVDKKVEPKSCDKTHTCPPCPAPELLGGPSVFLFPPKPKDTLMISRTPEVTCVVVDVSHEDPEVKFNWYVDGVEVHNAKTKPREEQYGSTYRVVSVLTVLHQDWLNGKEYKCKVSNKALPAPIEKTISKAKGQPREPQVCTLPPSRDELTKNQVSLSCAVKGFYPSDIAVEWESNGQPENNYKTTPPVLDSDGSFFLVSKLTVDKSRWQQGNVFSCSVLHEALHSHYTQKSLSLSPGK

SEQ ID NO: 816 - protein, 453 aa, Artificial Sequence
  Synthetic polypeptide
ELQLQESGPGLVKPSETLSLTCTVSGGSISDSSYYWGWIRQPPGKGLEWIGSIYYTGETYYAPSLKSRVTISVDTSKNQFSLKLSSVTAADTAVYYCARVRYGVGVPRHFDPWGQGTLVTVSSASTKGPSVFPLAPSSKSTSGGTAALGCLVKDYFPEPVTVSWNSGALTSGVHTFPAVLQSSGLYSLSSVVTVPSSSLGTQTYICNVNHKPSNTKVDKKVEPKSCDKTHTCPPCPAPELLGGPSVFLFPPKPKDTLMISRTPEVTCVVVDVSHEDPEVKFNWYVDGVEVHNAKTKPREEQYGSTYRVVSVLTVLHQDWLNGKEYKCKVSNKALPAPIEKTISKAKGQPREPQVYTLPPSRDELTKNQVSLWCLVKGFYPSDIAVEWESNGQPENNYKTTPPVLDSDGSFFLYSKLTVDKSRWQQGNVFSCSVLHEALHSHYTQKSLSLSPGK

SEQ ID NO: 817 - protein, 453 aa, Artificial Sequence
  Synthetic polypeptide
ELQLQESGPGLVKPSETLSLTCTVSGGSISDSSYYWGWIRQPPGKGLEWIGSIYYTGETYYAPSLKSRVTISVDTSKNQFSLKLSSVTAADTAVYYCARVRYGVGVPRHFDPWGQGTLVTVSSASTKGPSVFPLAPSSKSTSGGTAALGCLVKDYFPEPVTVSWNSGALTSGVHTFPAVLQSSGLYSLSSVVTVPSSSLGTQTYICNVNHKPSNTKVDKKVEPKSCDKTHTCPPCPAPELLGGPSVFLFPPKPKDTLMISRTPEVTCVVVDVSHEDPEVKFNWYVDGVEVHNAKTKPREEQYGSTYRVVSVLTVLHQDWLNGKEYKCKVSNKALPAPIEKTISKAKGQPREPQVYTLPPSRDELTKNQVSLSCAVKGFYPSDIAVEWESNGQPENNYKTTPPVLDSDGSFFLVSKLTVDKSRWQQGNVFSCSVLHEALHSHYTQKSLSLSPGK

SEQ ID NO: 818 - protein, 453 aa, Artificial Sequence
  Synthetic polypeptide
ELQLQESGPGLVKPSETLSLTCTVSGGSISDSSYYWGWIRQPPGKGLEWIGSIYYTGETYYAPSLKSRVTISVDTSKNQFSLKLSSVTAADTAVYYCARVRYGVGVPRHFDPWGQGTLVTVSSASTKGPSVFPLAPSSKSTSGGTAALGCLVKDYFPEPVTVSWNSGALTSGVHTFPAVLQSSGLYSLSSVVTVPSSSLGTQTYICNVNHKPSNTKVDKKVEPKSCDKTHTCPPCPAPELLGGPSVFLFPPKPKDTLYITREPEVTCVVVDVSHEDPEVKFNWYVDGVEVHNAKTKPREEQYGSTYRVVSVLTVLHQDWLNGKEYKCKVSNKALPAPIEKTISKAKGQPREPQVYTLPPCRDELTKNQVSLWCLVKGFYPSDIAVEWESNGQPENNYKTTPPVLDSDGSFFLYSKLTVDKSRWQQGNVFSCSVMHEALHNHYTQKSLSLSPGK

SEQ ID NO: 819 - protein, 453 aa, Artificial Sequence
  Synthetic polypeptide
ELQLQESGPGLVKPSETLSLTCTVSGGSISDSSYYWGWIRQPPGKGLEWIGSIYYTGETYYAPSLKSRVTISVDTSKNQFSLKLSSVTAADTAVYYCARVRYGVGVPRHFDPWGQGTLVTVSSASTKGPSVFPLAPSSKSTSGGTAALGCLVKDYFPEPVTVSWNSGALTSGVHTFPAVLQSSGLYSLSSVVTVPSSSLGTQTYICNVNHKPSNTKVDKKVEPKSCDKTHTCPPCPAPELLGGPSVFLFPPKPKDTLYITREPEVTCVVVDVSHEDPEVKFNWYVDGVEVHNAKTKPREEQYGSTYRVVSVLTVLHQDWLNGKEYKCKVSNKALPAPIEKTISKAKGQPREPQVCTLPPSRDELTKNQVSLSCAVKGFYPSDIAVEWESNGQPENNYKTTPPVLDSDGSFFLVSKLTVDKSRWQQGNVFSCSVMHEALHNHYTQKSLSLSPGK

SEQ ID NO: 820 - protein, 453 aa, Artificial Sequence
  Synthetic polypeptide
QLQLQESGPGLVKPSETLSLTCTVSGGSISDSSYYWGWIRQPPGKGLEWIGSIYYTGETYYAPSLKSRVTISVDTSKNQFSLKLSSVTAADTAVYYCARVRYGVGVPRHFDPWGQGTLVTVSSASTKGPSVFPLAPSSKSTSGGTAALGCLVKDYFPEPVTVSWNSGALTSGVHTFPAVLQSSGLYSLSSVVTVPSSSLGTQTYICNVNHKPSNTKVDKKVEPKSCDKTHTCPPCPAPEAAGGPSVFLFPPKPKDTLMISRTPEVTCVVVDVSHEDPEVKFNWYVDGVEVHNAKTKPREEQYNSTYRVVSVLTVLHQDWLNGKEYKCKVSNKALPAPIEKTISKAKGQPREPQVYTLPPCRDELTKNQVSLWCLVKGFYPSDIAVEWESNGQPENNYKTTPPVLDSDGSFFLYSKLTVDKSRWQQGNVFSCSVMHEALHNHYTQKSLSLSPGK

SEQ ID NO: 821 - protein, 453 aa, Artificial Sequence
  Synthetic polypeptide
QLQLQESGPGLVKPSETLSLTCTVSGGSISDSSYYWGWIRQPPGKGLEWIGSIYYTGETYYAPSLKSRVTISVDTSKNQFSLKLSSVTAADTAVYYCARVRYGVGVPRHFDPWGQGTLVTVSSASTKGPSVFPLAPSSKSTSGGTAALGCLVKDYFPEPVTVSWNSGALTSGVHTFPAVLQSSGLYSLSSVVTVPSSSLGTQTYICNVNHKPSNTKVDKKVEPKSCDKTHTCPPCPAPEAAGGPSVFLFPPKPKDTLMISRTPEVTCVVVDVSHEDPEVKFNWYVDGVEVHNAKTKPREEQYNSTYRVVSVLTVLHQDWLNGKEYKCKVSNKALPAPIEKTISKAKGQPREPQVCTLPPSRDELTKNQVSLSCAVKGFYPSDIAVEWESNGQPENNYKTTPPVLDSDGSFFLVSKLTVDKSRWQQGNVFSCSVMHEALHNHYTQKSLSLSPGK

SEQ ID NO: 822 - protein, 453 aa, Artificial Sequence
  Synthetic polypeptide
QLQLQESGPGLVKPSETLSLTCTVSGGSISDSSYYWGWIRQPPGKGLEWIGSIYYTGETYYAPSLKSRVTISVDTSKNQFSLKLSSVTAADTAVYYCARVRYGVGVPRHFDPWGQGTLVTVSSASTKGPSVFPLAPSSKSTSGGTAALGCLVKDYFPEPVTVSWNSGALTSGVHTFPAVLQSSGLYSLSSVVTVPSSSLGTQTYICNVNHKPSNTKVDKKVEPKSCDKTHTCPPCPAPEAAGGPSVFLFPPKPKDTLMISRTPEVTCVVVDVSHEDPEVKFNWYVDGVEVHNAKTKPREEQYNSTYRVVSVLTVLHQDWLNGKEYKCKVSNKALPAPIEKTISKAKGQPREPQVYTLPPSRDELTKNQVSLWCLVKGFYPSDIAVEWESNGQPENNYKTTPPVLDSDGSFFLYSKLTVDKSRWQQGNVFSCSVMHEALHNHYTQKSLSLSPGK

SEQ ID NO: 823 - protein, 453 aa, Artificial Sequence
  Synthetic polypeptide
QLQLQESGPGLVKPSETLSLTCTVSGGSISDSSYYWGWIRQPPGKGLEWIGSIYYTGETYYAPSLKSRVTISVDTSKNQFSLKLSSVTAADTAVYYCARVRYGVGVPRHFDPWGQGTLVTVSSASTKGPSVFPLAPSSKSTSGGTAALGCLVKDYFPEPVTVSWNSGALTSGVHTFPAVLQSSGLYSLSSVVTVPSSSLGTQTYICNVNHKPSNTKVDKKVEPKSCDKTHTCPPCPAPEAAGGPSVFLFPPKPKDTLMISRTPEVTCVVVDVSHEDPEVKFNWYVDGVEVHNAKTKPREEQYNSTYRVVSVLTVLHQDWLNGKEYKCKVSNKALPAPIEKTISKAKGQPREPQVYTLPPSRDELTKNQVSLSCAVKGFYPSDIAVEWESNGQPENNYKTTPPVLDSDGSFFLVSKLTVDKSRWQQGNVFSCSVMHEALHNHYTQKSLSLSPGK

SEQ ID NO: 824 - protein, 453 aa, Artificial Sequence
  Synthetic polypeptide
ELQLQESGPGLVKPSETLSLTCTVSGGSISDSSYYWGWIRQPPGKGLEWIGSIYYTGETYYAPSLKSRVTISVDTSKNQFSLKLSSVTAADTAVYYCARVRYGVGVPRHFDPWGQGTLVTVSSASTKGPSVFPLAPSSKSTSGGTAALGCLVKDYFPEPVTVSWNSGALTSGVHTFPAVLQSSGLYSLSSVVTVPSSSLGTQTYICNVNHKPSNTKVDKKVEPKSCDKTHTCPPCPAPEAAGGPSVFLFPPKPKDTLMISRTPEVTCVVVDVSHEDPEVKFNWYVDGVEVHNAKTKPREEQYNSTYRVVSVLTVLHQDWLNGKEYKCKVSNKALPAPIEKTISKAKGQPREPQVYTLPPCRDELTKNQVSLWCLVKGFYPSDIAVEWESNGQPENNYKTTPPVLDSDGSFFLYSKLTVDKSRWQQGNVFSCSVMHEALHNHYTQKSLSLSPGK

SEQ ID NO: 825 - protein, 453 aa, Artificial Sequence
  Synthetic polypeptide
ELQLQESGPGLVKPSETLSLTCTVSGGSISDSSYYWGWIRQPPGKGLEWIGSIYYTGETYYAPSLKSRVTISVDTSKNQFSLKLSSVTAADTAVYYCARVRYGVGVPRHFDPWGQGTLVTVSSASTKGPSVFPLAPSSKSTSGGTAALGCLVKDYFPEPVTVSWNSGALTSGVHTFPAVLQSSGLYSLSSVVTVPSSSLGTQTYICNVNHKPSNTKVDKKVEPKSCDKTHTCPPCPAPEAAGGPSVFLFPPKPKDTLMISRTPEVTCVVVDVSHEDPEVKFNWYVDGVEVHNAKTKPREEQYNSTYRVVSVLTVLHQDWLNGKEYKCKVSNKALPAPIEKTISKAKGQPREPQVCTLPPSRDELTKNQVSLSCAVKGFYPSDIAVEWESNGQPENNYKTTPPVLDSDGSFFLVSKLTVDKSRWQQGNVFSCSVMHEALHNHYTQKSLSLSPGK

SEQ ID NO: 826 - protein, 453 aa, Artificial Sequence
  Synthetic polypeptide
ELQLQESGPGLVKPSETLSLTCTVSGGSISDSSYYWGWIRQPPGKGLEWIGSIYYTGETYYAPSLKSRVTISVDTSKNQFSLKLSSVTAADTAVYYCARVRYGVGVPRHFDPWGQGTLVTVSSASTKGPSVFPLAPSSKSTSGGTAALGCLVKDYFPEPVTVSWNSGALTSGVHTFPAVLQSSGLYSLSSVVTVPSSSLGTQTYICNVNHKPSNTKVDKKVEPKSCDKTHTCPPCPAPEAAGGPSVFLFPPKPKDTLMISRTPEVTCVVVDVSHEDPEVKFNWYVDGVEVHNAKTKPREEQYNSTYRVVSVLTVLHQDWLNGKEYKCKVSNKALPAPIEKTISKAKGQPREPQVYTLPPSRDELTKNQVSLWCLVKGFYPSDIAVEWESNGQPENNYKTTPPVLDSDGSFFLYSKLTVDKSRWQQGNVFSCSVMHEALHNHYTQKSLSLSPGK

SEQ ID NO: 827 - protein, 453 aa, Artificial Sequence
  Synthetic polypeptide
ELQLQESGPGLVKPSETLSLTCTVSGGSISDSSYYWGWIRQPPGKGLEWIGSIYYTGETYYAPSLKSRVTISVDTSKNQFSLKLSSVTAADTAVYYCARVRYGVGVPRHFDPWGQGTLVTVSSASTKGPSVFPLAPSSKSTSGGTAALGCLVKDYFPEPVTVSWNSGALTSGVHTFPAVLQSSGLYSLSSVVTVPSSSLGTQTYICNVNHKPSNTKVDKKVEPKSCDKTHTCPPCPAPEAAGGPSVFLFPPKPKDTLMISRTPEVTCVVVDVSHEDPEVKFNWYVDGVEVHNAKTKPREEQYNSTYRVVSVLTVLHQDWLNGKEYKCKVSNKALPAPIEKTISKAKGQPREPQVYTLPPSRDELTKNQVSLSCAVKGFYPSDIAVEWESNGQPENNYKTTPPVLDSDGSFFLVSKLTVDKSRWQQGNVFSCSVMHEALHNHYTQKSLSLSPGK

What is claimed is:

1. An anti-IL-36 antibody comprising:
i. a heavy chain comprising a heavy chain variable region comprising at least one of a heavy chain hypervariable region (HVR-H1) comprising the sequence of SEQ ID NO: 106, a second heavy chain hypervariable region (HVR-H2) comprising the sequence of SEQ ID NO: 107, and a third heavy chain hypervariable region (HVR-H3) comprising the sequence of SEQ ID NO: 108, wherein the heavy chain further comprises Alanine residues at positions 234 and 235 according to the EU system of numbering; and
ii. a heavy chain comprising a heavy chain variable region comprising at least one of a heavy chain hypervariable region (HVR-H1) comprising the sequence of SEQ ID NO: 158, a second heavy chain hypervariable region (HVR-H2) comprising the sequence of SEQ ID NO: 159, and a third heavy chain hypervariable region (HVR-H3) comprising the sequence of SEQ ID NO: 160, wherein the heavy chain further comprises Alanine residues at positions 234 and 235 according to the EU system of numbering.

2. The anti-IL-36 antibody according claim 1 wherein the antibody comprises:
i. a heavy chain comprising a heavy chain variable region comprising a heavy chain hypervariable region (HVR-H1) comprising the sequence of SEQ ID NO: 106, a second heavy chain hypervariable region (HVR-H2) comprising the sequence of SEQ ID NO: 107, and a third heavy chain hypervariable region (HVR-H3) comprising the sequence of SEQ ID NO: 108, wherein the heavy chain further comprises Alanine residues at positions 234 and 235 according to the EU system of numbering; and
ii. a heavy chain comprising a heavy chain variable region comprising a heavy chain hypervariable region (HVR-H1) comprising the sequence of SEQ ID NO: 158, a second heavy chain hypervariable region (HVR-H2) comprising the sequence of SEQ ID NO: 159, and a third heavy chain hypervariable region (HVR-H3) comprising the sequence of SEQ ID NO: 160, wherein the heavy chain further comprises Alanine residues at positions 234 and 235 according to the EU system of numbering.

3. The anti-IL-36 antibody according to claim 1 or 2 wherein:
a. each heavy chain comprises at least one modification selected from Q1E, M428L/N434S, YTE, and a C-terminal Lysine, wherein the two heavy chains have the same modifications; and/or
b. one of the heavy chains has a “knob” modification T366W and the other heavy chain a “hole” modification T366S/L368A/Y407V.

4. The anti-IL-36 antibody according to any one of the preceding claims, wherein the heavy chain of (i) and the heavy chain of (ii) both comprise the same one of the following (a) to (x):
(a) Q-LALA-LS-S354/Y349-KiH; (b) Q-LALA-LS-S354/Y349-HiK (inverse); (c) Q-LALA-LS-KiH; (d) Q-LALA-LS-HiK (inverse); (e) Q-LALA-YTE-S354/Y349-KiH; (f) Q-LALA-YTE-S354/Y349-HiK (inverse); (g) Q-LALA-YTE-KiH; (h) Q-LALA-YTE-HiK (inverse); (i) E-LALA-LS-S354/Y349-KiH; (j) E-LALA-LS-S354/Y349-HiK (inverse); (k) E-LALA-LS-KiH; (l) E-LALA-LS-HiK (inverse); (m) E-LALA-YTE-S354/Y349-KiH; (n) E-LALA-YTE-S354/Y349-HiK (inverse); (o) E-LALA-YTE-KiH; (p) E-LALA-YTE-HiK (inverse); (q) Q-LALA-S354/Y349-KiH; (r) Q-LALA-S354/Y349-HiK (inverse); (s) Q-LALA KiH; (t) Q-LALA HiK (inverse); (u) E-LALA-S354/Y349-KiH; (v) E-LALA-S354/Y349-HiK (inverse); (w) E-LALA KiH; and (x) E-LALA HiK (inverse),
wherein:
“Q” is a Q as the N-terminal amino acid;
“E” is a Q1E modification with E as the N-terminal amino acid
“LALA” is a L234A L235A modification;
“LS” is a M428L/N434S modification;
“YTE” is a M252Y S254T T256E modification;
“KiH” indicates that the heavy chain of (i) has a “knob” modification and the heavy chain of (ii) has a “hole” modification T366S/L368A/Y407V; and
“HiK (inverse)” indicates that the heavy chain of (i) has a “hole” modification T366S/L368A/Y407V and the heavy chain of (ii) has a “knob” modification T366W,
optionally wherein the heavy chains each comprise a C-terminal Lysine residue.

5. The anti-IL-36 antibody according to any one of the preceding claims wherein the heavy chains of (i) and (ii) are one of the following pairs of SEQ ID NOS: 752/791; 753/790; 754/793; 755/792; 756/795; 757/794; 758/797; 759/796; 768/807; 769/806; 770/809; 771/808; 772/811; 773/810; 774/813; 775/812; 782/821; 783/820; 784/823; 785/822; 786/825; 787/824; and 788/827; and 789/826.

6. An anti-IL-36 antibody comprising:
i. a heavy chain comprising a heavy chain variable region comprising at least one of a heavy chain hypervariable region (HVR-H1) comprising the sequence of SEQ ID NO: 106, a second heavy chain hypervariable region (HVR-H2) comprising the sequence of SEQ ID NO: 107, and a third heavy chain hypervariable region (HVR-H3) comprising the sequence of SEQ ID NO: 108; and
ii. a heavy chain comprising a heavy chain variable region comprising at least one of a heavy chain hypervariable region (HVR-H1) comprising the sequence of SEQ ID NO: 158, a second heavy chain hypervariable region (HVR-H2) comprising the sequence of SEQ ID NO: 159, and a third heavy chain hypervariable region (HVR-H3) comprising the sequence of SEQ ID NO: 160,
wherein the heavy chain of (i) and the heavy chain of (ii) both comprise the same one of the following (a) to (ll):
(a) Q-LALA-LS-S354/Y349-KiH; (b) Q-LALA-LS-S354/Y349-HiK (inverse); (c) Q-LALA-LS-KiH; (d) Q-LALA-LS-HiK (inverse); (e) Q-LALA-YTE-S354/Y349-KiH; (f) Q-LALA-YTE-S354/Y349-HiK (inverse); (g) Q-LALA-YTE-KiH; (h) Q-LALA-YTE-HiK (inverse); (i) Q-N297G-LS-S354/Y349-KiH; (j) Q N297G-LS-S354/Y349-HiK (inverse); (k) Q-N297G-LS-KiH; (1) Q-N297G-LS-HiK (inverse); (m) Q-N297G-YTE-S354/Y349-KiH; (n) Q-N297G-YTE-S354/Y349-HiK (inverse); (o) Q-N297G-YTE-KiH; (p) Q-N297G-YTE-HiK (inverse); (q) E-LALA-LS-S354/Y349-KiH; (r) E-LALA-LS-S354/Y349-HiK (inverse); (s) E-LALA-LS-KiH; (t) E-LALA-LS-HiK (inverse); (u) E-LALA-YTE-S354/Y349-KiH; (v) E-LALA-YTE-S354/Y349-HiK (inverse); (w) E-LALA-YTE-KiH; (x) E-LALA-YTE-HiK (inverse); (y) E-N297G-LS-S354/Y349-KiH; (z) E-N297G-LS-S354/Y349-HiK (inverse); (aa) E-N297G-LS-KiH; (bb) E-N297G-LS-HiK (inverse); (cc) E-N297G-YTE-S354/Y349-KiH; (dd) E-N297G-YTE-S354/Y349-HiK (inverse); (ee) Q-LALA-S354/Y349-KiH; (ff) Q-LALA-S354/Y349-HiK (inverse); (gg) Q-LALA KiH; (hh) Q-LALA HiK (inverse); (ii) E-LALA-S354/Y349-KiH; (jj) E-LALA-S354/Y349-HiK (inverse); (kk) E-LALA KiH; and (ll) E-LALA HiK (inverse),
wherein:
“Q” is a Q as the N-terminal amino acid residue;
“E” is a Q1E modification with E as the N-terminal amino acid
“LALA” is a L234A L235A modification;
“N297G” is a N297G modification;
“LS” is a M428L/N434S modification;
“YTE” is a M252Y S254T T256E modification;
“KiH” indicates that the heavy chain of (i) has a “knob” modification T366W and the heavy chain of (ii) has a “hole” modification T366S/L368A/Y407V; and “HiK (inverse)” indicates that the heavy chain of (i) has a “hole” modification T366S/L368A/Y407V and the heavy chain of (ii) has a “knob” modification T366W,
optionally wherein each heavy chain further comprises a C-terminal Lysine residue.

7. The anti-IL-36 antibody of claim 6 wherein the antibody comprises:
i. a heavy chain comprising a heavy chain variable region comprising a heavy chain hypervariable region (HVR-H1) comprising the sequence of SEQ ID NO: 106, a second heavy chain hypervariable region (HVR-H2) comprising the sequence of SEQ ID NO: 107, and a third heavy chain hypervariable region (HVR-H3) comprising the sequence of SEQ ID NO: 108; and
ii. a heavy chain comprising a heavy chain variable region comprising a heavy chain hypervariable region (HVR-H1) comprising the sequence of SEQ ID NO: 158, a second heavy chain hypervariable region (HVR-H2) comprising the sequence of SEQ ID NO: 159, and a third heavy chain hypervariable region (HVR-H3) comprising the sequence of SEQ ID NO: 160.

8. The anti-IL-36 antibody according to claim 6 or 7 wherein the heavy chains of (i) and (ii) are one of the following pairs of SEQ ID Nos: 752/791; 753/790; 754/793; 755/792; 756/795; 757/794; 758/797; 759/796; 760/799; 761/798; 762/801; 763/800; 764/803; 765/802; 766/805; 767/804; 768/807; 769/806; 770/809; 771/808; 772/811; 773/810; 774/813; 775/812; 776/815; 777/814; 778/817; 779/816; 780/819; 781/818; 782/821; 783/820; 784/823; 785/822; 786/825; 787/824; 788/827; and 789/826.

9. The anti-IL-36 antibody according to claim 8 wherein the heavy chains of (i) and (ii) are one of the following pairs of SEQ ID Nos: 772/811; 773/810; 774/813; and 778/817.

10. The anti-IL-36 antibody according to any one of the preceding claims that:
a. comprises a light chain that pairs with both the heavy chain of (i) and the heavy chain of (ii);
b. comprises a light chain that pairs with the heavy chain of (i) to form an antigen-binding site for hu-IL-36β; and also pairs with the heavy chain of (ii) to form an antigen-binding site for hu-IL-36α and/or hu-IL-36γ;
c. comprises a light chain that comprises a first light chain hypervariable region (HVR-L1) having the sequence of SEQ ID NO: 18, a second light chain hypervariable region (HVR-L2) having the sequence of SEQ ID NO: 19, and a third light chain hypervariable region (HVR-L3) having the sequence of SEQ ID NO: 20;
d. comprises a light chain that comprises the light chain variable region of SEQ ID NO: 77 or 17;
e. comprises a light chain that comprises a light chain comprising the sequence of SEQ ID NO: 169, 242, or 246; or
f. is a bispecific antibody.

11. The anti-IL-36 antibody of claim 6 which is:
a. a bispecific antibody that comprises one of the following combinations of two heavy and one light chain sequences: SEQ ID Nos: 752/791/246; 753/790/246; 756/795/246; 757/794/246; 768/807/169; 769/806/169; 772/811/169; 773/810/169; 774/813/169; and 775/812/169;
b. a bispecific antibody comprising a pair of heavy chain sequences selected from one of the following pairs of SEQ ID Nos: 752/791; 753/790; 756/795; 757/794; 758/797; and 759/796 and further comprises the light chain of SEQ ID No: 246;
c. a bispecific antibody comprising a pair of heavy chain sequences selected from one of the following pairs of SEQ ID Nos: 752/791; 753/790; 756/795; and 757/794 and further comprises the light chain of SEQ ID No: 246; or
d. a bispecific antibody comprising a pair of heavy chain sequences selected from one of the following pairs of SEQ ID Nos: 752/791; 756/795; 757/794; and 758/797 and further comprising the light chain of SEQ ID No: 246.

12. The anti-IL-36 antibody of claim 6 which is a bispecific antibody that comprises one of the following combinations of two heavy and one light chain sequences: SEQ ID Nos: 772/811/169; 773/810/169; 774/813/169; and 778/817/169.

13. An isolated polynucleotide or vector encoding the antibody of any one of claims 1 to 12 or an isolated host cell comprising the polynucleotide or vector;
optionally wherein the host cell is selected from a Chinese hamster ovary (CHO) cell, a myeloma cell (e.g., Y0, NS0, Sp2/0), a monkey kidney cell (COS-7), a human embryonic kidney line (293), a baby hamster kidney cell (BHK), a mouse Sertoli cell (e.g., TM4), an African green monkey kidney cell (VERO-76), a human cervical carcinoma cell (HELA), a canine kidney cell, a human lung cell (W138), a human liver cell (Hep G2), a mouse mammary tumor cell, a TR1 cell, an Medical Research Council 5 (MRC 5) cell, and a Foreskin 4 (FS4) cell.

14. A method of producing an antibody comprising culturing the host cell of claim 13 so that an antibody is produced.

15. A pharmaceutical composition comprising an antibody of any one of claims 1 to 12 and a pharmaceutically acceptable carrier.

16. A method of treating a subject, the method comprising administering to the subject a therapeutically effective amount of an antibody of any one of claims 1 to 10 or a therapeutically effective amount of a pharmaceutical composition of claim 13;
optionally, wherein the disease is selected from: acne due to epidermal growth factor receptor inhibitors, acne and suppurative hidradenitis (PASH), acute generalized exanthematous pustulosis (AGEP), amicrobial pustulosis of the folds, amicrobial pustulosis of the scalp/leg, amicrobial subcorneal pustulosis, aseptic abscess syndrome, Behget's disease, bowel bypass syndrome, chronic obstructive pulmonary disease (COPD), childhood pustular dermatosis, Crohn's disease, deficiency of the interleukin-1 receptor antagonist (DIRA), deficiency of interleukin-36 receptor antagonist (DITRA), eczema, generalized pustular psoriasis (GPP), erythema elevatum diutinum, hidradenitis suppurativa, IgA pemphigus, inflammatory bowel disease (IBD), neutrophilic panniculitis, palmoplantar pustular psoriasis (PPP), psoriasis, psoriatic arthritis, pustular psoriasis (DIRA, DITRA), pyoderma gangrenosum, pyogenic arthritis pyoderma gangrenosum and acne (PAPA), pyogenic arthritis pyoderma gangrenosum acne and suppurative hidradenitis (PAPASH), rheumatoid neutrophilic dermatosis, synovitis acne pustulosis hyperostosis and osteitis (SAPHO), TNF-induced psoriasis form skin lesions in Crohn's patients, Sjogren's syndrome, Sweet's syndrome, systemic lupus erythematosus (SLE), ulcerative colitis, uveitis, and cancer; optionally, wherein the cancer is selected from breast cancer, colorectal cancer, non-small-cell lung cancer, and pancreatic cancer.

17. The antibody of any one of claims 1 to 12 for use in treating the human or animal body or in a method of diagnosis;
optionally, for use in a method of treating an inflammatory condition.
